United States Patent Application Publication US 2022/0008368 A1 - sequence listing, part 8

SEQ ID NO: 2 - DNA, 58617616 bp, Homo sapiens (residues 15,197,162-17,368,184 of 58,617,616)
  modified_base (1)..(60000): a, c, t, g, unknown or other
  modified_base (24448981)..(24498980): a, c, t, g, unknown or other
  modified_base (24552653)..(24552752): a, c, t, g, unknown or other
  modified_base (24891257)..(24891356): a, c, t, g, unknown or other
  modified_base (24895791)..(24895890): a, c, t, g, unknown or other
  modified_base (24898314)..(24904771): a, c, t, g, unknown or other
  modified_base (24908590)..(24908689): a, c, t, g, unknown or other
  modified_base (27190875)..(27240874): a, c, t, g, unknown or other
  modified_base (58607617)..(58617616): a, c, t, g, unknown or other
acctacctcatggggggctttacatgtgacctcaggtggccaagaactgtgaagctgggattactgggcccattttgcagaccatgacactgagatgtaaagagtttaattcctagccggtcagcaacatgatgtgggacttgaacccatgccaagaagagtgcagagcccctgctcagtttccaatggggaaacacgagaggttgcccaagccacacacatgtaggaagtggtagagacatccatggtgaacacagaggcagagggagaagacaaatcgcccctcccccccgcccccacacacagggcccactggtggctctgagccaggcactcacaggcaggcagcctcccgggagggcagctgggtgcaacgacctccatttgcacacgggcttccgtccaggcaagggggggctgtgtgggggtgaaggaaggtggaggatcagccaggtgcccaggaaccccaggcccaagtgacaaaccccctccctccctccaccaggcaacagctgcatggggatgggggcgtctctgcgggtgcagggagtccccccatccacagttcccacgccccccccccccccgccccagccccagctgttgaggctgcagctgtccctgccagctcgagccctgggaaccacaaagcaggggaaggcaggaggaggggctgtcttatgccagatgtgggggctcgggaagctgccagagctaagatgtgcagaatggggtgtgctgagacaggaagtaagggtgctgagtgttacagggaggtctggggcttcatgcccaggttcaggggtaatagaaggggaaggggcaggggatcctagggccacgggtcttcctttccctgatgggcatctactccagccaggcaggcctgcgtggtgctcttgggagagggaccaaggcatgtacccacgagtgagcacagcatctccagaagcagccagcgctgggcgttgctggaatagggtgtgtgttgaagggaggggcaactggcacaaggcatgtgctgccctgtccaacatcgccatccctaagggctgtgtccctctagggtgtggcatagtctaactgtcctgccagaagggtccagggtgtggctgggtctgagctagtggagaactgtgtgcatgcgatcaggtgtggggacacagtgcgtgtgtccatgcatgctcttgtcagagagagggtgatggagagaggaaggaagatcgagaaaaacacaaagacgtgagaatgaactagaagcagatagaccaggagaagacagagaaggacagaaagaaatagaaagcggccaggcatggtggctcacgcctctaatcccaacactttgggaggccgaggctggtggatcacctgaggtcaggagttcgagaccagcctggccaacacagtgaaacccagtctgttctaaaaatataaaacttagctgggcatggtagcaggtgcctgtaatcctagctactcaggaggctgaggcaggagaatcgcttgaacccaggagccagaggttccagtgagccgagatcacgccattgcactccaccctgggcaacaagagccaaactccatctccaaaaaaaaattagctgggtgtggtggcgcacgcctgtagtcccagctactcgggaggctgaggcaggagaatcgcttgaacctgggaagcggaggttgcagtgacccgagattgcgccactgcatgccagcctggcaacagagtgagactgtctcaaaaaaaaaaaagagagagagaaggacagaaagaaatagaaaacaagagggtgagttacagaatctgtcgagctgaacctgagcatgggcctacatagtatatgccccttcctcacaggacaagccgactggacaccatcacccacaccaggacctgtgggtgttcgtgaactcacactgtgggtcccataacatgggctatgggccaccctgagctgtaggcaatgtgagccacatgtgtgtgcgtgcacgggcttgtgtgtctgtatgtggatttgggcatgcatctattgtgtctcagttgcagctacatgtgagtctatctgtacatgcatgtcagcgtgggtgtgcccgtgtgtgtatgagctgcacacccatacgggaatgcacagatgtgtgtgctgtctgtatgcaggttgtgtctgttgtgcgtctgtgtatgtgaaccgtgtaaatgggtgtacagctgtgtgttggtgtgacctgtgtgtgcaccgctgtgtctgtgtatgggttggctgtgtctgtccatctgcatgtgtgagctgggtgtaagcatgtccttgagtcttcatctatgtgctgtctgagtgtgtgcaggcagcgtgtgtgccacacctgtgtgatcatatttgtgtgtgtatgtatgtcaatgtgtgagctgtgtgcgtgcagctgggtgtgtctttcctgagccaggtgtgcaagtctgcgagtgtgctgtgtgtgtgcaggtttgcatctctgttacgtgacctagagctatgtgtgccagcgagtgtgtcacaggccatgtgtgtgcgccgctggtccggcggaggcggcggctcctgcctggtcctgccccgtccgggccccggggctgggctggggaggccgttcactcccgaaacccccaccccgcccagcgccaagccccacactggcgtctgggacccctggccaggggccttggcccgcgcccctcccccgcccaccaggcctcccgtagcggtgaggggggtgcccccgcagccccctccccggcccagccgcgggtcccgctttgtctggcaaagaaagcgcgaggccggccggagggagggggtgtctagacggcgcggccattgtcccgagcgggggaggggagggaggagaggaggaggggcgggggcccctggccggctggggaggggctctggccgcggggagggggcgctggagccgaaggggagcacgtgggccctcgccccttcccctccccgcgcaggggcggggtcccagggcctccgggtccccgcggccagaggagagaggcgggctgcgggcgggggagggggcgcgcgcgccgccgaggctccggctcggaatccggctccgggtcttgctgcgcgccggcctgggaagttttctccgagttcagagctcccagaacttcgcgccccctccccaccccccgcctggcccagcccgcccggggtgtcgggggcggggtgggggggcttttgtgcgagaggtccccggcctagaagtacctgggcccccaatcataacctacccaggactccaggcgtgagttggatggggacgagtcccgaactctgtacgcacccccccacctcgagtccctgatccccgcacctcgagctcccagtctcggactcctgggtcccttcatcttcagctctaatcgctcaagggtccctgttccttgggcctctggggtcctccccattctgaatctctgggtcctccaggactggcatgaagcccggggctcctgcgccccttccccgaccctggttcctgcctcccatgaacccccgccagccccggccttgggggttcttgcactccccctctgccgccctcgtcccatccgccaggtcccggcccctcacctgcagcccccggccccgctagcagcagcagcaggggcagcgcccgcacgggtggcggtggcggtggcggcgacatcgggcgacggcggcggcggcggccacgggcccccggccccatggcggccggccgcgaccctcccctcctccctccttccctgggctccgggcgcgtcccgggccagcctccgcgccgccaacttcgccgaagtgaggcggccgggccgccccgcccccagccctcgaaggctcgccccgccccggggccggcccagcgcgcccccgccccccgcccggcctcccggggtccctgcccaccctccacccgcacagcctgggacgcgcggaccctcggaaacccaggccgagcatgcagtgagacgcgggcagaacccggagtggcgggcacacccaacctcgtgaacgcccacgcaccccatccccatcccccagtacacacccagagccggacacctctggagccgggacaaaaaacacagcctcccagaaactctggaaactgaggccagtcacgtcctgagaggctcatggacccacagccacggacgcacaaatgcaagcccatgcaccaagcttccccaggactctgatctaaaacattcacaaacctaaaagtcggaccgggcgcggtggctccggcctgtaatcccagcactttgagaggcagaggtggatggatcacttgaggtcaagagttggagaccagcctggccaacatggtgaaacccggactctactgaaaatacaaaaattagctgagcgtggtggcgcacgcctgtagtcccagctattcgagaggctgaagcaggaaaatcgcttcaacccaggaggctgaggttgcacttagccgaaatcgtaccactgcgctccagcctgggcaacagagtaagaccctgtctcaaacaaaacaaacaaacaaaaaaccgctaaaactcactcagccaggccaggagcctaggactacatttgcagcctcagacctcagacacgtactaggagtcacatgcatgtgtgtgtgttcacacatgcacacacaaactcttcttgctctcagccctcccagaaagcaacccacttcctctgtgactctcaaagggtcaccccagccccctagtcccacccccataccccacacagctttgggcctcagcctatctggctcaatttgattaattctcttttctttttttttttttttttgagacagcgtgtcgctctgtcacccaggctggagtgcagtgtccctatcttggctcactgcaagctctacctcccaggttcaagcgattctccttcctcagcccccacccccacaatctgccaagtagctgggattagaggtgtgcgccaccatacgtggctaattttttctgggtttttgtttacttgtttgtttgtttttgagacggagtctcgctctgttgcccaggctgaagtgcagtggcatgatctccgctcactgcaagttccgcctcctgggttcacaccattctcctgcctcagccgtccgagtagctgggactacaggcaactggcaccatgctctgctaattttttttttgtatttttagtagagacggggtttcaccgtgtcagccaggatggtctcgatctcctgacctcgtgatctgcctgcctcagcctcccaaagtgttgggattacaggcgtgagccaccgcgcccagcttctatttttttagtagagactgggttttgccatgttggccaggctggtctcgaactcctgacttcaagtgatccgcccgcctcagcctcccaaagtgctgggattacaggcgtgagccaccacgcccagccttgatcaattgccttttcccaaatcagtcatgctgcacaggcttcctgcagctccctctgttcctgtggaaagaatggggaccctgagaggcctggagcccagccctggaggaacttccagtctggggaagaaaaagctagacgcacacacacccagtgtggagggctcagggctgggccagagaaaggcatggaatctgggaagggcctggggtacacgggtggtgggtgaggactttgcctgggagggttatttatttgttcattcatgtattcaacaagtatggctaaggctccagccctgtatcacactctgttctatggactgggggtgcaccctggagggcgtccaagaggacgtccagtggggcttggccctgaaagttgagctggagggaagtcatcccagcagagggactggcccatgccaacaggaagggacagagttggaagggaacgtgtacaggccagaggttaagaggagaaaggagccatgcttactccttggtatctggcttggtgataaggatgctggaagaaggaatgggttgggtggaggagagatgctgggtttgagggggtcacctacaaggcaggtatggctgagcatgggagaaccattctggtaggagatagtcacatgggtatcccagaaatcttcagacaatttttttttttagacaaagtccctctgtcacccagactggagtgcagtggcgcgcgacctcggctcactgcaacctctgcctcccgggttcaactgattctcctgcctcagcctcccaagtagctgggattacaggcacacaccaccatgcctggctttgtatttttagtagagacagggtttcactatgtaggctaggctagtctcaaactcttgaactcaggtgatctaccctcctctgcctcccaaagtgctgggattacaggcatgagccaccacgccgggccaattttttttttttttttttttttttttgagatggagttttgctcttgttgccccggctggagtataatggcgcaatctcggctcaccacaacctctgcctcctgggttcaagtgattctcctgcctcagcttcccgagtaactgggattacaggcatgtgccaccatgtgtggctaattttgtgtttttagtagagacagagtttctccatgttggtcaggctggtctccaactcccgacctcaggtgatccacctgcctcagcctcccaaagtgctgggattacaggcatgagccaccacttccggactctttttttcttaagaccaagtctcggtctgtggcccaggctggagtgcagtggtgccatctcggctcactacaacctccattcctgagttcaagcgattctcctgcctcagttccccccgccaccccaagtaggtggaactacaggcccacaccaccatgcccggctaatttttgtgtctttggtagagacagggtttcaccatgttgtccaggctggtctcgaactcctgacctcaagtgatctacccacctcagcctcccaaagtgctggaattacaggcgtgagccgccatgcctggccacagtttttttaactttttatttgaaaataatttaagccgggcgcggtggctcatgcctgtaatcccagctctcagggaggcaagaggcgggaggatagcttgagcccagaagttcaagacctgcctgggcaatatagtgagaccccattctccacaaaaaggaaaaaaaaaaaaagacgaaaataatttaaaacacacaaagttgcatgccgggcgtggtggctcatgtctgtaatcccagcactttgggaggctgaggcaggaggattgtttgaggccaggagttcaaaatcagtctgggcaacatagcaagacctccatctctataaaaaattaaaataaaattaagagggtgtagtggtgagcgcctgtagtcccagctacttgggaggctgaagtgggaggatcacttgagcctggatgtcactgcacttcagcctgggcaacagagcaagaaccaacttcaaaacaaaaacaaaaaaaactgagagttacagaatagcgtgaacaacttgtataagccctttgtccagattcaccaaccacccacattttgccacatttgacatatatgtgtacatatacgttatacacatatgcatatatgcattttttggctaaatgatttgagagtaagttgtagatatgatgttcctttgccttcaaatactttgctgtgtgtttcctgagaacaagggtatcctctttcataaacatactacagtttttgccccagtctgtattcaaagtttgctagttgcccaaataatatcctttattgggccaggtacagtggctcacacctgtaatcccaacactttgagaggccaaggagggaggattggttgaggccaagagttcaaggccagcctgggcaacatagtaagactcctgactctacaaaactagaaaaaattagcagcatatagtggcgcgtacctgtagtcccagctactcaggaggctgaggtgagagcgttgcttgagcccaggaggtcgaggctgccgtgagctgtgatcatcctgctccactccagtctggataacagagcaagaccctgtggggaaaaaacaaaaaaattagtggccgggcgcggtggttcacacctgtaattccagcactttgggaggctgaggccggctgatcacctgaggtcaggagttcaagaccagcctggccaacatggtgaaaccccttttctactaaaaatacaaaaattaactgggcatggtgacaagtgcctgtaatcccagctactcgggaggctgaggcacgagaatcgcttgaacccaggaggcggagtttgcagtgagccgagatcgcgacactgcactccagactgggcaaaagagcatgattcagtctcaagaaaaaaaagaaaagaaaagaaaaaaaaaattaaatcttttattgcaatgtttctttgctggcccaggatctatctaatgctgcatcatgagttgcatctaatccttttgttttgagacagagtctcgcactgtcacccaggctggagtgcagtggcatgatcttgactcactgtaacctccacctcccaggttcaactgattctcctgcctcagcctcccaagtagctaggattctcctgcctcagcctcccaagtagctaggattctcctgcctcagccccccaagtagctagccaccacacccggctaattctaatccttatatctcttggtctcttttaatctgaattggttcctcagtctttctttgtctttcatgacactgacgtttttggagagctgaggtcagttgtgcagaatggccagcagttgtgcaggaatggctggcctgccatttcctcgtgatcaggttcaggctgtgcatcttcggcagaaaccacagaagcattgctgggtcctcctgggtgcatcgtatcaggaggttcctgacatcagttcccagcattggtgatgttcagctgtcatcaccggggcaaagttggtcaagtttccctgctataagggtgccattttcctccctttccatcctccccctttgtaagggggatgaaagttgaatgactgaccaggggctagcatcgcagaacagttaccctatagggagatacattgagaccgtgtgaatatcctactgcccaataagctttcccccatagattttagcatcttttgattatttctcctgatcattgttttgctttctttttttgttcgtttgtttttgttgttgttgttgttgttttctttctttctttcttttttttttttttgagacagtgtcttgctctgtttcccaggcagggttccagtggcacaatcatagttcactgcagcctcgaactcctgggcccaagtgaccctccttcctcagcctcccgagtagctgggactatagacacgccccacaactcctggccttctctggtgctttttgttttaattgaggtaaaattcacataacgtaaaattaaacattgaccactttaaagtgtgttcatactgtgtgaccatcacctctagttacagatcatttccatccctgcaaacggaaacctccccattctccctcctccaggccctcgaacccactaatccactttctgtctctatgaatttatccattctgggcatttcgtgtcaatggaatcatacactatgtagccttttgtgtctggcttctcatcatgtttttggggttgttctatgttttagcatggatcctggcttccttccttttaattttattttattagttattattattattattattattattattattattattattattatttttcaagacagggtctcactctgttgcacccaggctggagtgcagtggcacgatctcagctgactgcaacctccatctcctgggttcaagtgattctcctgcctcagcctcttgaatagctgtgactacaggtacttgccaccacactcagctaatttttgtatttttagtagttaataatcctagttattttgtaaaaatataaaaatttatgtttttaatagagcctcaccatgttggccaggctggtctcagcctcccaaagtgctgggattacaggcatgagccactgtgcccggccttccttcctttttatggctaagtaatatttcattgaatggctataccacacattacttatccagtggtccattaatactttggatggatgattttttttttttttgagacggagtctcactctgtcacccaggctggagtgcagtggtgtgatctcagctcactgcaacctccgcctcctggattcaatcaattctctgcctcagctctcaagtaactgggattacaggcactcaccaccatgcctgactaatttttgtattttagtagaaacgagggtttcactatcttggccaggctggtctcgaactcctgaccttgtgatccacccgcctcggcctcccaaaatgctgggattacaggcatgaaccactgtgcctggctggatggattttttttttttttttgacggtctcttgctctgttccctaggccggagtgcagtggcgcaatcttggctcactgcaacctctgcctcccaggttcaagagattctcctgccttagcctcctgagtagctggggttacaggtgcaccaccatgcccagataactttgtgtatttttagtagggacagggtttcaccataccgtccaggctggtctcaaactcctgaccttgtgatctgcccgctttagcctcccaaagcgctggattacaggcgtgagccaccacgcctggctggatggatgatttttaaaggctgaaagagaaagaagcaaaggagacagagaaggattgtcaaagagagacagccgggcatggtggctcatgcctgtaatcacactttaggaggcagatgcagaagaattgcttgagctcaggaattccagataagcctgggcaacatagtgaaatcccatctctataaaaaattttaaaattgccgggtgtggtggctcacccctgtaatcccaccatttgggaggccaaggcgggaggatcataagttcaggagatggagaccatcctggctaacatggtgaaaccccgtccctactaaaaaatacgaaaaattagccaggcatggtggcacgtgcctgtagtcccagctactcagaggctgaggcaagagaatcgcttgaacccgggaggcagaagttgcagtgagccgagattgtgccactgcactccagcctgggtgacagagtgagactccgtcacaaaaaaaaaaaaaaaaaaaaattaattatctgggcatgggcacacactggtagtcccagctacttaagagtctgaggggctgggcgcggtggctcacatctgtaatcccagtactttgggaggccgaggcgggcggatcatgaggtcaggagatcgagaccatcctggctaacacggtgaaaccctgtctctatttaaaaaatacaaaaaattagccgggcgtggtgatgggcgcctgtagtcccagctactcgggaggttgaggcaggagaatggtgtgaacctgggagacagagctttcagtgagccgagatcgtgccactgcactccagcctgggcgacacagcgagactccatctcaaaaaaaaaaaaaaaaaaaaaaaagaagaggctgaggcggaaggatcgcttgagcccaggagttccaggctgcagtgagctatgatcacaccactgcactccaacctgggtgacagagctgtctcaaaaagagagagagagagagagtgctaaggatgaaagttgaggcccgggcacagtggctcacgcctgtaatcccaacactttgggaggccgaggcgggcagatcacaaggtcaggagttccagaccagcctgaccaacatggtgaaaccctgtctctactaaaaatacaaaaattagccgggcatggtggcgcatgcctgtaatcccagctactcaggaggctaaggcaggacaaccacttgaactcgggaagtggaggttgcagtgagccaagatcgcgccactgcactccagcctgggtgacaaagcgagactctgtctcaaaaaaaaaaaaagaagaagaagaaagttgaatgactgaccagcggctagcatcactgacaacccctggtcttgccctggcttctcagagggcaggaggtgaagatgttcaatcatttccatcttacaggtacagccatataacttagagaagacaggccaggcgcggtggctcacgcctggaatcccagcactttgggaggctgaggtgggtggatcacctgaggtcaggagtttgagaccagcctggctaacatggtgaagccccgtctctactaaaatacaaaacttagctgggcacggtggcgggtggctgtaatcccagctactcaggaggctgatgcaggagaatcgcttgaacctggaaggcagaggttgcagtgagccgagatcgcaccactgcactccagcctgggcaacaatagtgaaactccatctcaaaaaaaacaaaaaacaaaaaaaacagtgactcactgcagcctttctggaagaaaagttgaggtttgaagctaagtctcaagccaggtgtagcggtgcacgcctatagtcccagccactcgggacactgaggcaggaggatcgcttgagcccaggagttccaggctgcagatgatcatgacactgcattccagccttggagcaagactttctcaaaagaaaaaaaaaaaactggctgggcacagtgtagcacacctgtaatctcagaactttgggaggctgaggcagaaggatcacttgagctcagagtttgagaccagactgggccacatagtgagactctgtctctacaaaaaaagaaaagaaagaattagctgggtgtggtggtgtgcacctgttgtcccagctactcagggggctgaggcaggaggatcacctgagcctagagttcgagaccagcctgggtagcacagtgagaccccatacacctgtagtcccagctatgtgggcgtctgaggcaggaggatcacctgagcctaggagttccagactgcagggagccatggtcgagtcgcaccactgcactgcagcctggccaacagagtgaccttattaaaaaaaaaaaaaaggaagaaaaagaaaaaaaatgaacctgggtctcagtgactcccggccacatggagtacaggggcggggtaggggttgggcagaggaataacagaagttgcctaagaaggggcacacactgactcacggtgactgtgctgagtcaagaggcccatggggacaggcacagatctagtcctgcgtcatgcctaccacccaggaaggaaatccaaggccctcagtcctgcatttgggccccttgggccgggactgaccctctccttcctaaccctccccaccaaacccccagcaaaaacaacaaacaaaaaaccattgtcacaccatgtcaaaccccagatgcaaccagcaggccttgtgctcccatggtctttgcctgggtgcttccctctgcctgagacacccagctgcacagaaacacccttttgcttcctccccaagcaggaactcacagccagtgtgacctcttcaaaaattcattttcttccagctagagggaatgttctgctgtttctcacacagttctcacacaggccacccctttgcccatgccgctctctttatttttttcttttcttttcttttttttttttttttttgagacagagtttcgctcttgtcacccaggctggagtgcagtagtggtgtgacctcggctcactgcagcctccacctcccaggttcaagtgattctccggcctcagcctcccatggaattacaggggcgggccaccacacccggctaatttttgtatttttagtagagatggggtttcaccatgttggccaggctggtctcgaactcctgacctcaagtgatccgcccgcctcagccttccaaagtgctgggattacaggcgtgagccaccacgcctggcctgctctctttctttctttctatttatttatttacttatttttaatagagacagggtctcgttctataggccaggctggagtgcagtggcgtgaacacagctcactgcagccttgacctcccaggcttaagtgatcctcccaccttggcctcccgagtagttggaattacaggtgctcagcaccacaccctgcttatttttgtattttttgtagcgatgagtgtctcgctatgttgcccaggctggtctcaaactccagagcttgagcgatcctcctgctcttggcctcccaaagtgctgggattccaggcctgagccactgtgcctggccccttatttctatttctggttacctcctatccattcttcagggataccactccgggaagtcctccctgtccctcagtctgcgctgctctctccccgacacccccgctctcccggtgccctttttctccatggctcagccttgttcacaaggggttgggggtgtctgtaccctggtttgtcccctatttaaagactaagggctggctgggcacaggggctcatgcctgtcatcccaacactttgagaggacgaggggggtgggtcacctgaggacaggcatttcagaccagcctgggtaacatggtaaaaccctgtgtctacaaaaaacacaaaaattagctgggcatgctggtgcatacctgtagtcccagcaattcagaagactgaggtgggaggattgcttgatcctgggaggtggaggttgcagtgagctgagatcgtgcccctgcactccagcctgggtgacagactgagaccctgtctcaaaacaaaaacaaaaaacaaacaaacaaaggactgagggctccttgggggttagacagaggatgaggcttcttgagggtcccagcatcccccagcatggagtgagcaaaaagcaggtgacgtaggacggtttggtgactcaggaaggggctgaaggagctgggaagcccagcccagaagagccacttcagggccgggcgaggtggctcacgcctgtaatcccagcactttgggaggccaaggtgggcagatcacgaggtcaggagatcgagaccatcctggctaacatggtgaaaccccatctctactaaaaatacaaaaaattagccgggcgtggtggcaggtgcctgtagtcccagctactcgggaggctgaggcaggagaatcacttgaacccagaaggtggaggttgcagtgacccaagatcgcaccactgcactccagcctggtgacagagtgagaccctgtcccccgaaaaaaaagccacttagccacttcaggggcctcaaaccactctgttcagtataattttgcaggcgggggtggtctatggttccacagaagggtctagggattgaggggcaaagttagggccctcaaggaaaggccagctcctcccttggcccatctgagaaggggctttctttcttttttttctttattttatttatttatttatttattttgagacagaatgtcattctgtcacccaggctaggctgcagtggctcgatctcggctcactgaaacctccgcctccggtgttcaagcgattgagaaagggctttctgctggaatggatgctgtaggaggtgctgagctcctcatcactaggagcaaccaaggaccctggacacacatttcactaggcaggaagttcagagtctgtgactgctgatacagcacaccctgatctgtgggagagggggaagtaacggtgaaaacccaggcagaggacttcacgggggaatacagactaaaagaagaaagacccggccaggagcggtggctcatgcctgtaatcccagcacttggggaggctgagacgtgcggatcacttgaggtcaggagttcgagaccagcctggccaatatggtgaaaccccatctctactaaaaatacaaaaattagtcaggcttggtggcagacgcctgtaatcccagctacttgggaggctgaggcaggagaatcacttgaggcaggagaatcatccctgcaacccaggaggcagaggttgcagtgagccgagatcgcaccactgcactccagcctgggcaacagagcaagactctatctcaagaaaaaaagaaaaagaccccgccgggtgcagtggctcaagcctgtaatcccagcactttgggaggccgaggtgggcggatcacaaggtcaggagattgagaccatcctggttaacatggtgaaaccccgactctactaaaaatacaaaagaaattagccgggtgtggtgacgggcgcctgtagtctcagctacttgggaggctgaggcaggagaatggcgtgaacctgggaggtggagcttgcagtgagcagagattgtgccactgcactccagcctgggagacagagcgagactccatctcaaaaaaaaaaaaaaaagaagaagaagaaagacccatctacaaagcacccgctcagccgaagatggggtctcagctgcgggttcctgccactgccctccagccacggtggtgggacccacccaaggtgtccagatccctaggggactgggcagtcggagcaacccttcccatggccttgcagctgcggccgcacagttcccaacatggtgggggtgggcttgagccccctccccggcccctgctggctgccttggctggggactgcatttctcctccatgagctcagtccctggggacgcgggacctggggccaggccaagacacagctgccggcccgctgaccgggaacctgagaatgtgcccttggcttctcctcttgggactacagtcccgccctctgcgcggaagctggggccaggttctcgagccaggcagtgggctgtgggagcctagtgagaaccagcaggagtgagggcaattgagtgtgggccttcggcaagtgtggggaggctggacccagccatgtcccctggacactgcttccctgggacactccgatgcttgaaacttccatggctccccattgcctgaagtgacacaattcctccccacctcatcagcttcatctccctgcctctcagccttgtcagcctttgcatgcagagttcccactggtaggaaaatgcttctcatactacaaaggctcctttcccctggctgctcactctgaacctccagctcttctcaccttcattcagtcattcaacaaacatttactggacacctacttggtgccaggccttattgtagacagaggtgacccaagacagagccagttcctgccctgagaagggaagcagacaagaaacaaataggcaaacaagaaccatcaaggttgagtgcagtggctcacgcctgtaatcccagcactttgggaggccaaggaaggaggatcacttgagtccaggagttcagaaccagcctggtcaacatagcgagaccccacctgtctcttcagaagaaaaaaaaaaatttttttttgagatagagtctcgctctgtcactaggctagagtgcagtggcaccatctccactcactgcaacctccacctcccggatccaagtgattctcctgcctcagcctcctgagtagctgggattacaggcatgcgccaccacgtctggctagttttttttttttttgtatttttagtagagacagggtttcaccatgttggtcacgctggtctcgaactcctgagctcgtgatccacctgcctcggcctcccaaactgctgggattacaggcatgagccaccatgcctggcctaagaaaattttttaaattagccaggcataggtggtgcatgcctgtagacccatctactcccgaggctaaggcaggaggatcacttgagcccagagtttgaggctgcagagagctatgattgtgccattgcacttcagcctgggcaaaagagcaagaccctgtcttaaaaaaataataataaagaggctgggtgtgatggctcatgcctgtaatcccagcactttgggaggctgagttgggtggatcacctgaggtcaggaattcgagaccagtctgggtcaacatggtgaaacctcatctctactaaaaatacaaaaattagccgagcacggtggcaggtgcctgtaatcccagctactcaggaggctgaggcaggagaattgcttgaacccgggaggcggaggttgtcatgagctgagattgcaccactgcactccagcctgggtgacggagggagattccatctcaaaaaaaaaaaaagaaagaaaaaagaaaagaaaccaaaacagagccattgagacaagatggttaaatgtgagggagagagggggaagtcacctaaagaaggagaggagccagcgaggcaaacatccagggctagggtgttccagacagagtgaacagcaagtgcaaaggcccagaggaggaaggagagggtggacgagaggaacagcgaggaagcctgggtgcctggtgctgaatgagcaaaggtgaggaggtcagggaagcaggtggggctgactcccaaggggccagagggtctgggattctagcccaagcacagtgaagccactggagggttttagcacaagaagctgatctgatttagtttgcaaacaatcactttgggtttttttggttttttggagacagagtctcactctgtcgcccaggctgtagtgcagtggtatgatctcacctcactgcaacctctgcctccgggttcaagtgattctcgtgcctcagcctcccgagtagctgggactacaggtgcacaccgccatgcccaggtaatttttttgtttctttgagacagaatttcactcttgtcacccaggctggagtgcaatggcgtgatctcgactcactgcaacctccgcctcccgggttcaagctattctcctgcctcagcctcccaagtagctgggattacaggcatgcaccaccacgcccagctaattttgtatttttagtagagatagggtttctccatgttggtcaggatagtcttgaactcccgacctcaggtgatccacccacctcggcctcataaagtgcttgggattacaggcgtgagccactgcacccgccatttttatttatttatttttattttttcacggagtctcactctgttgcccaagctggagtgcaatggtgccatctcagctaactgcagcttccacctcctgggttcaagcaattctcatgcctcagcctcccaagtagctggaattacaggcaccagccatcatgcccagctaatttttttatttttgtaaagaacgggttttaccatgttggtcgggctggtcttggacttctgacctcaggtgatcggcccacctctgcctctcaaagtgttgggattacaggcgtgagtcaccgcctcagccttttttttgtttgtttttttggagttagagacaggttctctctttgtcacccaggtggagtgcagtggtgcaattgtagctcactgtaacctcaaactcctgggctcaagcgatcctcccctcagcctcctaagaagctaggacctacagacatgcaccaccatgcccggctaatttttttttctttgtctttttttttttttttttttttttttgagacggattctcgctgtcgccaggctggagtgcagtggcatgatctcagctcactgcaacctccgcctctcaggttcaagcgattctcctgcctcagcctccccagtagctgggactacagatgcgtgccaccacgcttagctaatttttgtatttttagtagagacggggtttcaccatattggccaggatggtcttgatctctcgacctcgtgatctgcccgccttggcctcccaaagtgctgggattacaggcgtgagccactgcgcccacccttttttttttttttttttttcctgtagagatacagtcttgaactcttggcctcaagcaatcttcctgcctcagcctcctgaagtgcgggaattacaggcatgagccaccatgcccagcctggaattcacttcgatggagcgtctgcagctctgtggctctgggaaagggtagaagggaggccattctcaaccccttctgggggtgctggtttccccaccccagaagcttccattgggtctgacgccctgttctctgtcctgtcttctcaggccctgggctccggaccacagcaaccttccatgcccatggcctcaccctggatcttatctcctcttgctcacctctgaactgtgatattctgatgtcccctaactcagtggcctccaacctctttggcaccagggactggttttgtgaaagacaatttttccacggaccggggtagggggtggtttcgggatgattcacgtgcattactttttttattttttacttttttgaggcggagtttcgctcttgttgctcaggctggagtgcagtggcgtgatctcggctcaccgcaacctccgactcccgggttcaagcgattatcctgcctcagcctgccgagtagctgggattacaggcatgtgccaccatgcctggctaattttgtatttttagtagagatgaggtttctccatgttggtcgggctggtctcaaactcctgacctcaggttatcctcccacctcggcctcccaaagtgctgagattacaggtgtgagccaccgtgcctggacactggacactttctttttttctttctttctttttttttttgagatggagtctcactttgttgcccaggctgaagggtagtggcacaatctcggctgactgcaacatctgcctcccgagttcaagcatttctcctgcctcagcctcccgagtagctgggattatatatgtgcaccaccacacccagctaatttttgtatttttagtagagacagagtttcaccatgttggccaggctggtcttgagcccctgacctcaggtgattcgcccgccttggcctcccaaagtgctgggattagaggcgtaagccaccgtgctcggcctacattttaatttttatttatgtatttgagacagagtctcgctctgtcacccaggctggaatgcagtggtgtgatctcggctcactgcaacctctgcctcttgggttcaagtgattcttgtgcctcagcctcctgattagctgggattacaggtgtgcgccactacacccacctagtttttgtattttcagtagacagggtttcatcatgttggccaggctggtctctaacacatggtctcaagtgatccatccacctcagcctcccaaagttgtgggattacaggcatgagccaccgcgaccagcctcaaacgcataagatttattgtgcactttatttctattattattacattgtactatatgatgaaataatgatacaaccgtaatgtagcaacagtgggagccctgagcttgttttcctgcaactagacggtcccatctgagggttatgtgagacagtgacagatcatcaggcattagatactcataaagagcatgcagtctagatccctcacatgcgcggttcacagtagggtttgcactcctatgagactctaatgctgctgcttatctgacaggaggcagagctcaggtggtaatttgcggagggggaggggctgtaaatacagatggagcctcgctggctctcccgccactcagcttctgctgtatggccctgtttctctgtggcctgaggtttgaggacccctgcccttactgctccctgaccccagaagtttgtcctccttcctgtaggggtgacacttgtccccactgtcccaactaccttccctcctacttgagagaaggggacctcctcccctaggctttcattacctccttccttagccataggctgaaatctcttccatgatgaagtaaaaatctggccaggtgcagtggcccacacctgtaatcccagcactttgggaggccgaggagggcagatcacttgaggtcaggagtttgagaccaacctggccaacatggtgaaaccctatctgtactaaaaataaaaaaattggccaggcatggtggttcatgtctctaacgtcagcaatttgcaaggcgggcagatcgcctgagttcaggagttcgagagcagcctggccaacatggtgaaaccccctctcaactaaaaatacaaaaattagccaggtgtggtggcgggcacctgtaatcccagctactagggaggctgaggcaggagaaccgcttgaactcgggaggcggaggttgcagtgagccaagattgtgccactgcactccagcctgggtgacagagcaagactccgtctcaataaacaacaaacaaacaaacaaaaattagctggaggtgatagtgtgagcctgtagtcccagctacgcaggaggctgaagcaggagaaccacttgaacccaggaaggcagaggttatagtgagcttagatctcaccactgcactccagcccgggtgacagagtgagactccatcttacaaaaaattaaataggcagggcctggtggctcacatctgtaatcccagcactttgggaggccaaggtgggcagattgtctggtggctcacatctgtaatcctagcactttgggaggccaaggtgggcagattgctgagctcaggagttcaagaccagcctgggcaacgtggtgaaaccctgtctctactgaaatacaaaaaattagccgggcgtggcagcgtgagcctgtaatcccagctactcaggaggctgaggcagtagaatcacttgaacctgggagttggaggttgcagtgagccgagattgtgccgctgcactccagcctggaagacagagcgagactccatctcaaaaaaataaaaaaatacaagaaataaataaatactaaagtaaaatccacagcaaatgctcatcccacatctgcccggccccagctctggtcgcctctccctgctttgcacctccccagacccctggctccacctctcccttctccactccactctgtgcattctacagatgttcttgtcctccagtttccggtgggtttggacaactggaggcactagcagaagatgtagggcgggcttggtggctcatgcttgtaatcccagcactttgggaggccgaggtgggcggatcacttgaggtcaggagttcgagaccagcctggccaacatggtgaaaccccgtctctactaaaaatacaaaaattagccgggcgtggtggtgggtgcctgtaattccagctacttgggaggctaaggcaggagaatcacttgaacctgggaggcagaggttgcagtgagctgaaatcacgtcactgcactccagcctgggcaacaagagcgacaccccatctcaaaaaaaaaaaaaagaagaaaaagaaaaagaaaaaaaaagatgtcagaggaaagtgaattggggacactaatcctcccggatccctccctgcggggtcgcctcaacttggctgtgtccatcatccacacgactctctccctaggctctgctaacatccttccccttgccccatcgggagcatccagaaatgataaaggatctccaagggtgcttgccctggctgcctcagcaactcctgttggtttccccaaactctgcccacaccactgtgtatagtccttgcagcaaacctgcctcaaatttcccggtttgtaattttttttttttttaatttttagagactgggtctcactgtgttgcccaggctggtgtcgaactcctaaactcaaacgattatctctcctcagcctcccaaagctctgggattacaggagtgagcccgggtgcctgaccgcattactctgtttgaatgtgttcagttgtttttccccaagcctccaatatttccttgcccctccctgcttaacctcattcagagcagccaagccctctgccttcagtctcactcctggctttcctccctcataacttggagatttgtatagctctcacttgattatctcagaggttgtttttgttttattttgttttgttttgttttagggttttttgttttttgtttgagacaaggtctcgctctgtctcccaggctggagtgcagtggcacgatctcagctcacggcaacctccacctcccaggttcaagcaattctcaagcctcagtttcctgagtagctgggactacagggacccgctaccacgcccagctaagtgtttttttttttttaagtagagacggagtttcaccatgttggccaggctggtcttgaactctggcctcaagtgatctgctcaccttggcctcccaaagtgctgggattacacgagtgagccactacgcccggcctgggtttttgtttgtttgtttttaagacacggtcttgctctgtctccaggctggagtgcagtggcatgatcacagctcattgtagtcttgacctcacaagctcaagcgatcctcccatctcagcctcctgaggagctaggactacaggcacacgcctccatgcccagcagttaaatttttttttttttttttaagagacaaggggtcttgcaatgtttccaaggctggtctcaaaactcttggtctgccgtgatcctccttcctcggcctcccaaagtgctgggattgaaggcatgaaccaccacgcttgtctctcagcagcttgtgacgccaggaactacatccctattccttgacgctcctccctcctccattgctggggcatcacttttgcctggttcacctcctacctttttttttttttttttttttgagatggagtctagctctgtcatccaggctgtagtgcagtggtgtgatcttggctcactataacctccacctcccgggttcaagcgattctcctgcctcagcctcccgagtagctgggattacaggcgcccaccaccacgcctggctaatatttgtatttttagtagagacggggtttcgctgtgctggacaggcttgtctcaaactcctgacttcgtgttcctcccgcctcggcctcccaaagtgctgggattacaggtgtgagccactgtgcctagactttttttttgagatggagtctccctctctcgcccaggctggagtgcagtggcatgatcttggctcactgcaacctctgcctcccgggttcaagtgattctcctgcctcagcctcccgagtagctgggactacaggcatgtgccaccatgcccggctaattttttgtaattttggtagaggtggggtttcaccatgttagccaggacggtctcgatctcctgaccttgtgatctgcccgcctcggcctcccaaagtgctgggattacaggcgtgagccaccgtgcctggcctcacctcctacctttgtggcctctctcctctgcctgtctctgaggtgttgggggtcctcagggttcagtctccagtcttgttctccattctgctctagggagacttcaccctcgctcccagcttaagagcctctctgccccacaatacaccgatgcttgctgggctatttttgtctttagcccataacatgcttctaagtccctaccccgggatccagcgccgtcagactgaatatatcccaaacctgcctctgtaccttctcagcgtatctgctcctcttccagtgcctggacttgagtctcgttctccactgcctggaccacgcccatcctcctctgaggccttcccgtcctctggtccggccttctcaccatcccccaagtaacattccagacacacggatctgtccgagaccctcccctgctggcatgtgaagccttttatagtctcacgtcttcctagcccaaactttcctcccagtctcacggaaatgctaaatcatcccggcgtgggaggcttctgtgggtcggggcgcagctttgcaaggttcagctccaagactgcttcctccagggagccttccctcccttcccccaggtaagtgctcctccccagttgctcattccaccagggcctgatcacaccctgctggcagtgtcagagcccggctttgtcttccaccacccctcctagaactggtggcagggacagatgaatggatgaatgaatgaatgggaagtgagaattctactactggaccatcaatgcagccctcggaatgagtgagtgagtgagtgagtgagtgagtgagtgatggaaagtggtctggaggcagggagagggacaggccgatcatgcgaggaatcccagcccaagcccccgaggtccccgctcccgccctaaaagatgcacgcgccaagcccttgggccagaaaaaaaaaaaaaaaacgggccgggattggctcaggctgggggaggcgggtctacgacgagacacgattttctattggcttactcgccaggactctgcccaatcgacgcgatcgtcttccccagaagacccccgcctccctcccgccggcggccgcggaggcggaagaaggcgcctttccgtcgccctagcaaccgtcagcggatctccgtcgcccgggcaactgtcccaggcctcccgtcagcctttgcctgggcccctccggtcactcggacaaccgctacccgttccggtcaaccatcaacccgtcccccgtcaccccggcaaccatcgccggacccacctacccctggacgccgtcctggtcctgtccgcaggcctcctcgccccaaacctccgccgcgggctccgacgtccgcgaccccacgtctcaggggctccctcctcctcctgcccgtcttctcgcctccccggggcggggggcattgctcctcccctggcaggggggccccgggttggacccggctctgggggtccctgctcggtcgggacagtgggaccgccctgtgctgtggccgcgcgcagccccccgcaggcttcggcgctcgcactcttgcgtgggactgtccaaccgccacagggagctcttcaaaatgcaagccatgtcccttccctgctgaaaaccctcccctggctccccttgagaatcgaatccaagctcctcgcagcccctggcgatctggctgtgtggcctcttctctgaagcctcctcgctcactctgccttagcaaggccctggcctgcgtgttgtaactccaatgacccaagcttcttcccgcctgggaccttcctagtcactacttcccactccaccaaaaagtgcatcctagacgggcgcggtggctcatgcctggaatcccagcactttgggaggccgaggtgggaggatcacttgagccgaggagtttgagaccactctgggcagcatagtgagacgtctgtctctataaaaaatttttgggaggccgaggcaggcggactgcttgaggtcaggcgttggagatcagcctggccaacatggtgaaaccccgtctctgctaaaattacaaaaattagccaggtgtggtggcgtgtgtctgtaatcctagctactggggaggctgaggcaggagaatcacttgaacccaggaggtggaagttgcagtgagctgagatggcgccactgcactcccgcctgggcaatagagcaagcctccattctcaaaaaaaaaattaaaaattagcctggcatggtggtgtgcccctatagtcccagctactcaggaagctgaagcaggaggattgattgagcccaggaggtagaggctgctgtgagcttacgtcacaccactgcactccagcctgggcaacagagtgagaccctgtctcaaaacaacaacaaataagtgcatcctctagctagggtcccacctgtgagtcttcagtgaagccttccctgagccctgtcagctctctcctccttaaactctttctggctcacactctgtcactaggacctagaacactgcctggtatctatgttgagtaaaaagatgttgtgccaggcgcagtggctcacgcctgtagtcccagcactttgggaggccgaggtgggcggataatgaggtcaggaattcgagaccagcctggccaacatggtgaaaccccatctctactaaaaatacaaaaatgggccaggtgcggtggctcacgcctgtagtcccagcactttgggaggccgagacgggtgaatcatgaggtcaggagatcgagaccatcctggctaacacggtgaaaccctgtctctactaaaaatacaaaaaattagccgggcgtggtggtgggcgcctgtagtcccagctactcgggaggctgaggcaggaaaatggtgtgaacccgggaggcggagcttgcagtgagccgagatcgcaccactgcactccatcctgggacagagcgagactccgtctcaaaaaaaaaaaaaaaaaaaaaaaatacaaaaatgagctgggtgtggtggcggacacctgtaatcccagctgttcaggaggcagagacaggagaatcgcttgagcctgggagggggctgcagtgagccgagatcgcgcaattgcactccagcctgggcgacagagcaagactccatctcacaaacaaacaaacaaaaaaaggatattgtgctggggataagggaggacagagggggatgaccagcaggcaggcctatctcagagacaggagaatgtatttctcagggcctctcagtcctcatggtacaggtgatgatggcaacatccccaaaaagccaggcacaagccagggagatacaagctgatgctacggtcagcctgagactgggtggcgcaccctccacatataaccgccaccccccacccatccccaccccagagggctccagagtcagcggaaactgtggctaatttggagcagaagtttccaggagctggagaggcaggcctcagatcccagatggcttttctgggagctggtcccttcctgcccggaatccagaatctcacttgtcctaacagagacgagagctgttttcccagggatctgagacaggccagcccaggctggggcaagagaacttgacctgaccaggcctggggtcatgacggggggtgagggaaggggcttgtgggagctctcctgggactggctggagaggaatgaggaatctgcacacccacctgcctgctcatgagggtctgcccttggggaggttgccaggggccaggcagggaggccccctgctctttttttttttttttgagatggagtctcgctctgttgccaggctagagtgcagtggcgcgatctcagctcaccgcaagctccacttcccgggttcatgccattctcctgcctcagcctcctgagtagctaggactacaggcgcccaccaccacgcccggctaattttttgtatttttagtagagacagcatttcaccaggttagccaggatggtctcgatctcctgacctcgtgatccgcccacctcagcctcccaaagtgctgggattacaggtttgagccactgtggtcggccctgacccctactcttaagctaggattaccctcatcagcgctgccacacacaactttcttcactgatgcggcaattgagcacttgaaatacagctggtatggccaggcacagtggctcacgcctgtaatcccagcactgtgggaggccaaggtgggcagatcacttgaggtcagcagttcgagaccagcccggccaacatggtgaaaccccatctctactgaaaatactaaaattagtcaggcctggtgacgctcctgtagtcccagctactcgggaagctgaggcacaagaatcgcttgaacccggcaggtggaggttgcagtgagcctagattgcgtccactgcactccatccagcctgggcgacacagcaagactctgtctcaaggggaaaaaaatgaaatacagctggtgggactgagcactgcattttcattgtatttcatttcaattaacatacatttaagctgaagtagccaaatgtggtcagcagtattgtattcagagtagcactgagctgaagacccaggcaggaggtcgaaggcagggacaggaaggtcagggtttaaggtctgtgcagctatggcagagaagcgactttggcaaagcgcagagtgaggccccaggaagggaggaggtgggacactcggtctcggcatctggctccactggaagagaggtatacccagttcccagggtcaaagtgtttgttacacacacatgcatccatgcctgtgtgtgagtataggggttggtgtgtcccgaggcacccataggtgcgcttgtgtgggatccaggagtcccatgcctatgagcgattcaagagttcacccatgtatggacattgtatggactcccaggcacacacagataatgggtgtgtgttccttcctgagtatccatgcctcctgggcaggccagcaaggaccactagtccagcaggtcttgcaagaaggcccacatgtactggtgcatctcctgggggttgctctgtgggatccaatgccctatgcctggcaggatgtgggcctccaagcggcccggcacaaagcggctgccgatggcttccaccagccccagctccaagtaagtgtccttctccccccacagcagcaatgtgggtgtggtcagctcctggggttccagggggaagttcctgtggccaggacagacagacaggcagacagacaggcagaaggatggttgcctcccacccccctgcccctgcaaatctcctgagcttatgcttggcaactggtctcacctgaagaggtttcggtagtagttgaggggcccagtgaggccaccaggctgtgagaagttataaaggaaggcctcgagctcgctgggggtcaagcatgggatgcctgtcttgcggtgggtgagggtggtcttcagaatctaggtacacagcaggactctggcttcagtgcccagcctgcccagccccgacctgcttccctcctcccttcaacctgcaccctctgtacctgaaagtcagacatagacagcagcttctcgggcagccagggcagctggaacaggaacatgtagtgggaacggaagaactggctgatgtggtgcagggaatagtctggggtgggagggttgggggagagatataaggcctgctcctggggtggccccatacacctgcacccctacacatacccaggtcagggacacaagcctcaggaatgccactgctgcctgcctgggtctgtgaaggtactagatacccctcctggcctgggcaccagctacattccctcctgccatgtttcactatccacaggatgggggcatctcctgggaacccccatatccaaaggtgtgcttcctctgcccaggccagggtgcgtttcctctgctttattcagctaacatttattgagcaactactgcatgccaggccttgttctagacacagcagtgaatgagacagtcaaaactccctgttcatcctaggcaacttaaggaaacccctgtatctataatttttttttttttttttttttttttttttttttgagacagagtctcgctctgtcgcccaggctggagtgcagtggtgtgatcttggctcactgcgagctccgcctcccgggttcacgccattctcctgcctcagcctcccggtagctgggactacaggcacccgccaccacgtccggctaattttttttgtatttttagtagagacagggtttcacagtgttagccaggatggtctcgatctccggacctcatgatccacccgcctcagcctcccaaagttctgggattacagacgtgaaccaccgcacccggcctccaaaaaataattttttaaaaattagcagggtgtggtggtgtgtgcctatagtcccagctacttgagaagcagaagtgggaggatcgcttgagcccaggagtctgaggctgcagtgagctgcaattacagcactgcactccagcctggaccacagaacaagactgtctcaaaggaaaaaaaacaaaacacaaaaaaagacacccccaaaagacaaaaaactccctgccctcagggagctgacagtctagatggggagacagacaagtaaacaataataggctgggtgcggtggctcacgcctgtaatcccagcactttgggaagccaaggcgggtggatcacttgagatcaggagttagacactaacctgggcaacatagtgaaaacccgtctccactaaaaatacaaaaattagctgggcgtgttggggcatatctgcagtccccgctactctggaggctgaggaaggagagtcacttgaacccaggaggtagaggttgccaggcagggtggctcactcctgtaatcccagcactttgggaggctgaggccggcagatcgcttgagcccaggagttcaagaccagcctggccaacatgctgaaaccccatttctactaaaaatacaaaataattagccggtcatggtggcacacatctgtagtctcagctactgaggaggctgaggcaagagaatcacttgaacctgagaggcggaggttgccgtgagccgacattgcgccactgcactgcacagagtgagactccatctcaagaaaaaaaaaaaaaaaaggggccaggcgtggtggctcacgcctatactcccagcactttgagaggccaaggtgggcagatcacaaggtcaggagatcaagaccatcttggccaacatggtgaaaccccgtctctactaaaatacaaaaaattagcccggcatggtggcctgtaatcccagctacttgggaggctgaggcaggggaatcgcttgaacctgggaggcggaggttgcagtgaactgagatcacgccactgcactccagcctggcgacagagcaagactctgtctcaaaaaaaaaaaaaaaaaaaaaaaaaagaaaagaaaagaaaaagaaaaaaaacaacaaaagagagagagagagcacagttatgaccacagtgctgcatattaacatcaggtgatatgatagacattgttaacctccccagcctcagtttcctccagctggaacatggggataatacaaccttcataagcccaggagccttaagtaggttactgtgtgcatattccttgttactgtaagtgctataaaaaaatgtggattactcctaagtgtattgtgatttattttattttattttatttttgagacagagtctcactctgtcatccaggctggagtgcagtggtgcgatcttggcttactgcaacctccacttctcaggttcaagtgattctcttgcctcagcctcccgagtagctgagactacaagcgtgcactaccatgcctggctgatttttttgtatttttagtagagacggggtttcaccatgttggccaggctggtcttgaacccctgggctcaagcaatccaccggctttggcctcccaaagtgcagggattacaggcaggagccaccacgcctggccatactttattttatttatttattttttgagatggagttttgctcttgttgcctaggctggagtgcaatggcatgatctcagctcactgcaacctccacctcccaggttcaagagattctcctgcatcagcctcccgagtagctgggattacaggcatgcaccaccaatgcctggctaattacattttttttttttttttgtagagacagttggggtcttgctatgttgaccagactggtcttgaactcctggcctcaagtgatcctcccacctcagcctcccggagggctgggattacaggtgtgagccactgggtctggcgtgtcattaatttccgaatgaggagttccacaaccgaagggacctgggttgattgctgcaccctcagcccctgatgtgttgacaggtatacagagaattgaaaacacagacacatgtccctgcccccttgcacataagtacatcccagtgtcccggactcccacacacaccttggtacaccgacatgggggcaccactgaccacaaccatccgctcgaccagggatgggtagtagatggagaaatgccaggcaaggagggcaccccagtcatgggccacaaggatgcacttcgagtaacctgtgggaattcaaggagctcgcataagtgaggtgcccagtaggactgaagcagggatgggggaagtaggttccagcaaggagaaagcgggggtatgcgtgtgtgcaggatgagggaggccacgcctaggatgggggtatgtctgcacccaggcctaggatgacatctttgatgtccaccagcagcaggtcgattgtgtagcagtccacatcccgaggtgcatccgaggggccatagcctcgcaagtccacagccacaacatggaagcggctctggaactcccggagctggtaacgccaggagaacctgccaggcgggcgagggagggaggctgagtcagggccctcaggttgcacctgcaccctacgcacatcagcaaccattggcaaaccctccttcctgctctaaacttcccctaaaaggaggatggggaatcccaggcagaggcagaggctgaggctgaagccagctacaccctgaatccagggaacttcaatcaacctcaatacccctttgtcctgtcccttcagggcctagggatcctgggtatgctggctcagtacccctatccccatctatgttcagcttgtcccgatctatacagccctcctccctgcctcttgggagcccaagctccacctgcccccgagtcccgtgggcctcaggcccctggccccagacgtaccagttctcagggaagccgtgcagaaacagcatgaggggtccgttacctcgtccagccgagacatagtgcagacgcaggcccgagctctagggggagggcacagcctgaagcctggggaaccctctctcccgaggcttgaaccgtctcgaccccacgcgaccccgcagccccgatagcgcccccgtgcgatcaccttgaggttcaggaaaccgtgctcacccagcgaggggtcgctcaggcaggcgggggacgcgctccgacggcgcccgcagcagccgcgccggggccggcacagcacgtgcgtgagcgctatgcagccgtagaccgccgcggccaccagcgccaccgagaacaccaggctccacatgaaggcgcgcagcagcttcagcgacaggcgcgacggcgccagcagcgcggtcaccaccagctccggcatgtcgccgcgctccgggaccacggcggcgctgccggccaggggcacctgcagcagcggcgaagcggtgtcagggctcaggggcccatcgcccttggcctggggcccctccgtgccgtcgggatttgtgggacgcgctgaaggaagaggcgggcggctccgacagaaaacagccagagcgcaccactcacctgagtgccaggtaaacacctgggcgcgacagggacaggaaacaagggtagggtgcggaggctggggaggaagaggttggaaaggggggaaataaatgggcggggcctagcaggtcctgtgcggggcttagggccggggcggggcccaggaagactcagcagcgggtgggtgagggtctaaaggcggcaattccgggccgggtgcggtggctcacgcctgtaatcccagcactttggtaggccgaggcgggcggatcacctgagatcaagagctcgagaccagcctgggcaacgtggtgaaaccccgtctctactaaaaatacaaaaattagctgggcgtggtggcgggcgcctgtagtcccagctacttgggaggctgaggcaggagaatcgcttgaacccgggacgtggaggttgcagtgagctgagatcgcgccactgtactccagcctgggtcacaacagggaaactccgtctcaaaaaagaaaaaaaaaaaaggcaattccgagcccagacaaaccttaaggaggggatcctggatcttcagttaagtgggcgacacctggagtgaggggcggggcatatgcagagtaggtgcggcctacaagccaaaaaggagaaagagttggaatggtgggcctggcttatgcgggtgggcggggagagggtggatcctagaggaggtgaggcctaacattgggcgaagaaggcgggagcctgggccaatgagctgacggtaggccggggagggggcggtggggtggggtgggcaatgggcaatgagacggagggcggggccgggacctaatatggcgggtcaggagggtctggaagacgaagaagagggacaggcaatgccaggtctaggactaggagggaggcgcgggcggtattagcggctggaggaggcttcgggaggcccggccgacggccgccgcctggtgctacccacccaggggcgcgcgaccctcccttcggtctggctccaaagacctagcagcactgacttcacccagctgtggttccaacggcgggtccagcggcctcggcccggcgccgtcctcctgctggcccaacaggcccgccagcccgcccctgtacgtctgtgattggacggcggcggccactgatgttcaagcgacaggtcctggcccgggagccaatctgcaggtgttgaggcccaggctccgagagcgggccgaggaggcgtggataccctgattcctagggggcaggcctggttcccccgaggaggacccggcctatgaatgactggagttctggggttctggccgaaagaggaagtgggacagggccgggtgtgatggggcctagagtcacagagccttgcggccctgctgtccctgcaagaagccagcttctggccaggcgcggtggctcacgcctgtaatcccagcactttgggaggccgaggcgggcggatcacgaggtcaggagatcgagaccatcctaacatggtgaaaccctgtctctactaaaaatacaaaaaattagccaggcgtggtggcgggcgcctgtagtcccagctactagggaggctgaggcaggagaacggcgtgaacccaggaggcggaggttgcagtgagctgagattgcgccactgcactccagccagggcgacagagcgagactccgtctcaaaaaaaaaaaaaaaagcagccagcttcttcctcctattttgcaaccttctcccgatatccttgaacattttagggacagccatcacttaaccatagagcaaccctattaagtctaagtagcataatcacattcctgtagtatagatcatgaacctgaaattcgaggatgaagtcatttgcctgaagacatacatcttgtaaaatagccatccgcaaagatgtagggaaaaaggcagcgatctgtggctacacctccccttcctcccggaagcagccactggaacgtttttagctttttctttttttttcagatggagtttcgatcatagctcactgcagcctcgaactcctgggctcaagcactacaacctgtagttgggactacaggcctgtgccaccacactcagctaatttttcaaaaacttttcagagagacgacttgctatattgtccaggctggtctcaaactcctggcctcaagcaatcctcaagcctccacctcccaaagtgggattacagatgcaagccaccgtgcctgacctttatttcttgacttaaccaatgtatgacatcagccactgacttgctcacatcactaccccggacgtgccgttttttgtttccctgttagtttcctttaaaaacactccacttgtcacctcttgcccctttccacctcccacttttatccatatacctttgtactgtcaaggctgctaaacattatactgtcctgggaccataactaagtccatgaagttgccacttaaaggtgaatagtggtttatgttctgcctcagtgaacaatgcatctcaagagccgaatagaccactatgattacattgcccatagtgtacaaacttttgttctccctggactacttaaccactacctttcttttgttgtgtgattagcctacatcaaagctttgggggtttttttgtttttgttttttttgagatgggagtctcaccatatcacccaagctggaatgcagtggtgtgatctcggctcaccgcaacctccgcctccagtgttcaagcaattctcctgcctcagcctccggagtagccgggactacaggtgtgtgctaccgcgccccgctaattttttgtatttttcagtagagatgggagtttcaccatgttggccaggctagtctcttaactcctgacctcaagcgatcctcccaccccggcctcccaaaagtgctgggattacagatgtgagccaccgtgcctggcagctttttcttttacaccttccattaaatcaattatctcacaatttgatgttcccaggatctctcccaaccgactccgctaatctggacgcatgggtggtgggtgtctggggaacctcccttcttcctctcctacacatcactgaccccccgccctcatctccccgcttctcccaagtctaccctcaaacaaaaagcagccatcacaggagagtaactttatactcagtacaaatgtttatttttgcaatgagaactgcacaaaaaaaaaaaaaaacctttcgtatgtaagtgaaaagtctacgaattcccttctacaaatgtctaaagtgtttaatacaagtctcagattcactgacataattattggccaagcgatccgtgcatacagtacagtgggggcttgtacacacctcttactctggtataggactaagatttctagtactgtgggaagggttgggaaatggctggagaaattaaatagatcccagttctaattacaacccaggtagagagacacccatcagggaggtgtggagaaggccatggctgagttaaatcttcagcaggaagctgcagagaaaactatccagctcagcagttggacccaggctggggaagtgtctgaacaaaacaaggaacaaaaatgagtgggtgggatgagatggaagaaaccccaaagaacctaaatacgtcacacttgaagtggcacagtggtatatgagaaagtgcctgagtgggcatggacatcgaagaagtggggggacctctggctggatgcctgaaccacaccctcacagggaggtttggcagatccaaagacaataaaggacctttcaggtcaaaaagaggggatgtaggagaataaacagtgctagaaatgtttcaatcagtttgtctctgcatacatataaattatatacttgtatcttacatcttaggggctcttcttgggcgtcacccgtgccttgtggctggggcatgtacatacacaagtggacacacaggcagagcagccacctgtgggctttcttggacaggaatgtgtgtgtatgtgcatggggggtgaggatcctattttgggggatgtagacttatatctaagagtatctggttaaccctgagcttaaatgaaaggaggagttaggttgaggcaggcaaggtgggagaagtggcccaagtcctttggtgagtggggggacaggatggagtaggggggacaggatggagtagggtggaggggaagaatactgtctggagtctggccagggttctgctagagcacaccctccacctcagccagggtccacaaggatgggtaccgggctctgcgtcacagcttcagcttggggtggttgctatgagtctgcgtggctcccgcccagggcagacagggacaggtcacaggagaggggctaggtaatccctggcagtagttcctgtacagaggtggtctggggtccagggggtcccctgggcctagcctaggcaacagttggttcacaaagaaatgtcagggagacgccagcattaaaaaaagagagatgtgtttattccatgatcagtacagaccaaatgcatattcaccgtatgaaagtcaaaccagtcagtgactccagagtttggccaacactgaggcaccagcgtcgtggtgtagagtgggttctcatggcacgcgtaacctcaccaggggctccaattataaaaattaaaaaaaaaaaaaaaaaaaagcatgggcaggagcggccagctggttggggctgggcgccaggtaggggagtctctgccttagtctgtggcgcccccagggcccggttcccacctcatcccttggcccttcctttctcagtaaaaaacaaaaacaaaaacaaaaaccaaaaccaaaaaaaccaactcaacagatctgacattaaaaaacaaaaaagccaacaaatgggtggggggggggggggtggaggggaaagaaaagaaattgtagctttctggttttataattaaaaatagactaataaagtttgaaactgagtaaaatataggcaggattttttttgtgtgttttgtctttttgtggatttttttgagcttttttcttttttcacaccagtttggtggagtcaccaacaaacttcaaacaaagatatgccaactatgttcactatacagtacagccacggtcacacactacccacagcgcggtggcagccgctgctcaatgaggagacgatcacaccatttcggagataagcagtgccattgtgtctggaggagaagagagaattaaaaataaaatagaattcaacaaaaaatatatatagaaaaaaaagaaaaaaaaaaacgaaacagaaacacaggtgggaaggaactgactttggttggtggcctcactccccggccgagggctacccacgcaggacagtcgcctcgctccggatgccatggacacacacacctccacggcactattcccttttgcacaagcaaacacttacagagagcggctctcaattaaaggcttgtgggggagggtcggggggtctgttcaaggcaaagtcagtgccagcgagggggtgggccggcctcgcccgcctccagcccacgcaggcctgccctggcctcctgggagcgggcggcgatggctggggtgtggggaaagactcccggcgggcaggacatcacgaacgtcacgttcttggggacagaaaaccagtcacggcggcagcaacgatgtcctgtgtatactgtgtagacatttggcggagagaagggcctctgccccgcatgtggggatgcagggcttgggtccagccggcacttgctcgtaacaaggcgtgtgctgagcggacgtcctgtgaggggtggtgggtggcgggacgtctgtccgactggccgtaaggcagacaggctctgcaatcctcagctgcccgtcaggcctgccccgggcatagcatgcaggagggccaggccctgaggcatcccctggccgctgatcccacctccaccaccgcccctaacactatggaaagtcaatgttttgccagaaaatcaaagtcagaagccacctaggtgcgctcagaaaagattttcttcaaatattgacaatagatcactctggaaattcatgtcaatggtagctgccatctggaggagaaaggaaggagggagtcaggaggatgacctagccaccctgcagctacaagccctcatacccgctaccagcagtcagccccgtagccctccccgtggctgacccctcatagcgctcaccccgtccacacagcactcagggccctacagctgagtccagaggaccacatgccgaccagcagggacggggctcccccgctgcccctccctgtccaggctccagtccccctttcccagctccctcaggagctaatccttagaccagggtccccaccaggcctccagactcacggcttcccggcgtcttcgctcctgctcccgcttccgggccaactccctctgctggtccagcatggactggggctgggagctctgggcctgtggggtggcggcggcagccaccgcagctgcttgctgttgctgctgctgctgttgctcctggcgctgctgctgctgctgctcctggcgccgacgtgcctcctcatgggcccgccgggcctgctccagcgcatcctcgtcctctcggctcctgggcagagggtcccagtcagcctggggactggtgtggccccaagagtccccatgccccacccagacacccgcccacctcatgcgctcctgccgcagccgctccttctccttctcagcgtgctcggcctgagccttcagggccttctcacgctcctctttctcccgagcggcgcggcggaactgctcgaagctgtcgctggatgacttggctgtggaggagggggtggtcggatgcttctgcactaggctggcccaggagcccatgttcttgattttcaggtcctgcagaacagagaggttggggtgggtgaggggtctgctgtgcctaaagggcatagctgggggtgtgcccagcatggcaccttccagggccaaggggcaagcgacacccatggacctccatcccaacctttttgggcgcaactggagtcttcggctcctgtttctgtttgtccttgtcaggggcccctggtggcggtgcgttctgctctgggggccggatcacaggcctcccgacatccacaggcttcatttccggccctggaacataaacagccggtgggccctggcccacctcaccccagtggggcatggtccaccagccccacagcaagcttatgtccaacacgggcctcggggggcctgagccctggctgtgggcagggagagcactcacgctggggcaggtggacgggggccttgatgctctccgggtgcttggggggctccggccgcagcgaggggctgaagggctcgctgcggatgatgggtgagtggatcttctcctccttcaccaccacgaggggctggggctggaccacggaggcagcacgcagctcctgggatggcacaggcacagcggccggtgaggtgggcaggcacccccggccctagcccacaggactatggcccagccctgccagttacctgtttcttaggctggacgttttgctggggtggagactggtgggtcaggctctggaactgtgacatctggggggaatgtatcataagcggggagggggcttcgcggaggtgacctaggagaagggacaaggaatgtgtcaaggggctggcttagaactgctggccctgagagaattgtcgggaaggaaaacgtgggctgtatggagaaactgcatgtgccgcccaggccctgggacaagggtccattagcccagctcaaaaagggtgaagacccacacaagtgactgggcctggtgaggacatgacccctccccgaaagggctgagtgccctgtgtccccctgcatgtggggcataactcagtgtgcagcagagctttctagggccctgtggcaccagtcctggtgtttgaccctcctgtgtgcatcagaatcatctgggatactgtggaaaacacagatcctgacacatgtgggcttggcagggcctgggccctaatactttttaaacccacaaagctcagcctgggttcctgccaactagcctggcccacctggatgattgcagggggtgcaagacccagtcctgggggtggggatgctcaggaccctccccacagtcctattccccactcagcctgcacgcccccacggaagagagaagcctggaattggcctccacctgcgccgagtggggagcaggcggaaaagggcctggagctgtctcttaggaaacaggccagcctgacacctgcatccaacccaaggctgggaaggatccagcagccacagggactactgggccctcaatcacagtgagccagcacctcgggactgtgcagctggagcagctgagtcctacccatccaacatgtggcctctctctgctggaatccctgcaggcaaggggcctcaccgctctttggctagctgcagctcgggacaagccacactgtccacagaggaggctgcccctctgcaacgcttttgctcccagcctagcctcatgcccatctccttccactgtctgtcagcacaggcacccttgggttctccaggagccctgctggctggaggcatctattttcataggcctggagcaaaccacaatgccccaggtgtggtagatcctctctagagccaggacccactcctaacgccagaagacactgcagctgcttggagcccacatggtggccaggcccatcctgtccccgcagcccactgctgtgtgtggctggttttcctggcgttgacatctcctccaattctagcacatcgggaccactttgggcactgccaattccattcagtgctggagggccccaggtctggcctgccagggatccacaggcacatgactgcaacagcctcccacccaactagggcagtgccttcagcacctgctgaggctgacctgggcaacggtaggctccaggggctgtggtttatagaaaccacctgcctgctggtgggttcagaggatggctcacggatgactcctgaaagctggctgggggcccagggatgcctgttaagtctctttgggagtctaacaacttggcttttggcctacaaagcccctagcaggatcccaatccacactgctcttgatgccccatcctagcctgctggggcttgggtcacggccagggacctgaagtagagctggctggagaagacctgcctcagccccgataggtgcctggtgcacccgagtgctggctcttctaaatgccttgcatcccctgtctatcacccccaacaggagtccagccctgcttcgcatgagaacaggcacagccgcacagctgccaggcccaacaccagtatttcccagggaggacaggcagcttgttcttggctcagggcatgcagagatccacttggcacctgactttttttttttttttttttttttttgagatagagtctccatctgttgcccagactggagtgcagtggcacgatctcagctcactgcaacctccgcctcccagactcaagcgattctcccgcctcagcctcccaagtggctgggattacaggtgcctgccaccatgcctggataatttttgtatttttagtacagatagggtttcaccatcttggtcaggctggtcttgaaactcctgacatcaggtgatccacctgccttggcctcccaaagtgctgggattacaggcgtgagccaccgcgcccggcctgcatccagcagcttttgctgggttaggagtaatcacagccctgcctcgttgcttgatttgcaggcagcacccggtacacacccaagacaggcagcaccatctacactgctgaggccaggaccctccaccctaaccctgcagcaccacatcaggaggcactgaccagaacatcccctgccggagccagccaggacattctggttactgacacttaagcgcccaggaaaagtgaaagggtgtggcctgaccaatgctgtcaatgggaaaagggtggcgtggactgggctggaggctggtaacaggcgatgaggacaggtcctgggcgggctctgagctgccttttgagcttccagctcagtgctccccacaccatggttctggctctccctgaacttcattcttcactctgctaagttagctgctacctgtctgcgatcactgcctcttggaagcatatcctgaccccctgaggtgcatcaggtacctcccctgggctcctagcttccccacctagcaagaagtcacctagcattgtcgtgctcctgactcaagagagggaccagaggggccttattctgagtgatctcacctcacaagcaagagagacacctgataaacacacactgtaggaagcaccaatgacccttccaggtccccctccaagctgaggctcagctctgaacccactgcagcctgaagcatgagttaacccttctggcttcctgaggacaaaactataggcccagcaccagcctccccagagtctacgggtgaggaccacttaccggttgagtaggggtccgacttgtggtgccggggtgaatggtggtgctggatgacttgctgaggcttggcaggctgcggcgggggtggctgctggcctgggggcggatgggggggctgctggccctggggtggcgggggctgttggatgtgggtggaaaactgcatgggctgcaagtgcacgggccgtggagggggctgatgctgctgctggggtggaggctggggctggggtggtgggggtggtggcggctgctgctgcagctgctgctgcacagaggggtggggtgggggcggcagggggggtgggggctgggactgcaccttcacggaagggagtagcggcgtagggggctgcaccttctgcagctgctgcaggtacagctgcatctgcatggaggtgaggggtggggcaggtggctcttcatcctccagcagcacttgggggggttgggccatggggggctgtgggagcaggggtgtttgggtcaaggctggtgacacggctgggggccgggcgggcttgggaggcagggcagcggctcggttgctgggccgtgatggctgctggggtagtgcgttgtgcaaagctggaagaacacaacaccgaggcggtgaggcctgagcacctgtggccccagcctggcctttctgctccatcctgacctcatctggactccagtgctctcctactggcctccctcaaactggcactccctccccacctaccgtggcctcccacaaactccagagcagtaaacagcttccagagagagctttagggcggtgtcatcctgccctatgctctgtgtccccagctcctgctccccatgctcacaatggcccttcacgcctcagtgcagaactcggtctctcacttgcccggccattccccaggcccccaggaaggtggccctgtccccatatcccccaggtgagtgctgtccaggttccatgggaggaatcccatctcatgagtgcatcccccaacccctgatgagaaaagctgcagaggggtcccagcttttcccatctaacatgacgcctggcccagcagcagaaataagtcaaaatcatctagattgttactcaaatgatgtcagtgttttagaaacaaaaatcttctgaatcaacgtgttaataactccatgcatgacctgtcttgaggcatctcctttaacttccaagatggcctcgagaagccacagatcttccctctagagaccagagcagctgaggctaagaagctgcccagccagagtgctcggacaccacatgggtaaaccgaggcaggaaggggtctcaacccacactggggcaggccacggctcacctggaggagagaccactgcgtgctggttgagatggggtggagtgctgtgctcaggcggctggggcaggtgagggggcagctcaggctgcggcaggtgcaggatgggctgggtgaagtggccgatggggtcaaagacgctgcctgggagctggggctccaggacgggcacctgggtggcaatgaagggtgggggcgaggacttcatcgccggggctgcctgctgcggcatggagggtgggggaggcgggggtggcggctgctgttgctgctgcggaggtggaggcggtgggggctgctggggaggcgggggcggctgctggggcacaggagccggggcctgctgcatctgctgatggtggtgatgatggtgctgcagacagagagacagacagacagacaggctgatgtcaggcaggcagaactggcccgggccagacccaacgtcccacctaatgaaggatgcccctgagcccatgtaccttcttctgctccctcccggggtgccccttcttttttgacttcggagccatctctgcagaggaaaagagaaggtagtgaggctctgggggagaaggtgagtgagctggccttggatgaagaaagacgagaaaacagggcactttcaggagaaggaccagtgaccctgagaaagggcagccgagttcaatgagggatgagttggtcatcacgggagagggagagacatgcgaggcatcacctacccacttgcctgctgcttttcctagcagggactgtgcctgaaaaagcctcccctgccaagcttcagatcaccacggttgcaccggaagctgagagcttgcccaacgcctcccactactcaagggtcagtcactcactatagtgactgagtgcatggcctggacagcaacctgctcagttttccaacaacctgtgatggttgcaatggtcacattcatcttacagctgagaaaagtggggcttcagaagggaggggacttgtccagggtcacatggctaaaaagcagcttctcgggggcctccaactgcatggccctctaaggcccactcctttccatcctccaaagggaagcagagaggctcagctggggctgagagccacaggacggtgaggaacatatcggcaagggaaaacacagagagcccactccgggagaaaaaaaaggagcaggctggcctcctgggaatgaccagctactaaagaggtagatggacctcagaagtccctgctttgggacacagtcaccatgctgcagacagaaggcagcatacgcccccactcgtgtgggccgacggcttggcaccacagtagggtggatgggtccagggtgtgtctgcccctgagaggtgtactcgagagccagcgtgcccacctctgtcctcaccccagagatttacactaagggacttttgccagttggatgtcccctcaccaaacatggatggtgtacaagccccacagggggacatgagccctggccagtgctcatgggctggcaggtcacagtcgcctgccaccagatgggaggccgggcccatggtatggcgccttttggattcctgtcactgagaagcacctcatggcactgcctggcttcgcctgagctccttgtcagggtgctgcctcttgctgctggtgttggaggacacatgctttgcccaaatccaggctccttccacttggatctgcttcgtggagggccacgctaagcttctgtgaggcacgtggccctcagtgcagcatgccaccaaaagggatggggaaggaccttgtgccctgtaagagctcaccactccacgccagacaagacacagacacagacctcagcagctacagacacacgtcctcgtacaaatgaccaggggctgcaactggggacacgggggaacctggggccccgcctaaaacctgcatacagggctcaggacgctctgggtcagagtatgacatctgatgagagagatactgttgtgggtgagacatgccagaagggaaagcttgagtagatttgcagtgtcagggcaacagggagtctgactgctgtggtggtggggggaggagcgctggctgcagaggttggcagccacaggaccagggggaccctgcacactagggaactgggaagaaaaggccagggcttctctcctggcacaaggaggtgatggagccgcgctgtctgggggcatgctgggcacaccttggaggggacccggggcagaaggcggaaggtagggggaagcagcagggccaccgtgtgaagtccgactaggagaagcctcagggatgtgtccagatatagagttgagggaaaaagtgtgtgtgcaagggaaggatatgctggggctcgcctgttgtctcgtggccttggaagaaaccttgtttttttggttgtaaaagagggatggtcactctaacccctcacagcctgcaggctgtgagcagaggcccataggagaagatgtagggacaaagcgcagcagggcctgtggggggttccagggggcatgtctcagctgccttggaaaggccacagggaatatcctgaggacttgtctccagggccccttgcaagtgctggggcccccaggcaaggcaggcctaaaaagtgggggagagaaggcggcatgtgcacggcagacccccaggaccagatgcctaaaggggctggtggtagaggtacccccttctggcccatgtggtctgagccttgtgtcagagttaccagtaaaagacaagacaggaagtgcacagcttcacaacacaccagccccaagacacccccacacaaaactctctagaaagggttacatgaagatggcctcaagtacggtgtgatctttattccatgacaatcttcaactcaacacaaatttcatctttacataggatggtaattgtacaaagaaataaaatgttttttaaaaatccgattaaaacactgattccacccaccccccagccccactccagtgaaggaggtaatggagggtaaggtcagggcagaggagaggagtccccatctgcactgagcggccgcctcccgcccctcctcaggacccacagccagctggtgcgtcgaggcccggctggcacttcctgcacaggaggctgccaacaagaagtgagtgggcactgtcctctctggctgttcctggggcaccaagcacaggtgacagcttaagtctaatgagctttcaagttcaacaagccctgaacgttctctgccagatggaagccccacgggcaagaaggacagggtccctggacagcgaggttgaaaggaccctggaggagagctggcttgtggctatggcccatgtgcacacgtgtgtgcgcgtgcgtgcgtgtgtcgggggcagcatgcaggcccgacactggtaatcaggctgccatttggtccaagaaagcagaatcttcccagaaagacaatgccagcagctccccaattgtcctgtgggaatctgggcatgaaggctctcctgcctgctcctgtctcaggcaggcgggactgcaacaggaacacatcaggcgcaggccaaagggcagctgagaatagtttgtttggcaaacagagcttaactggaagctggatgcccagaaaggatcaagagcagcccaggaactcctgagcatcaatgcagggccccgggaggccctggtgaggccagggctagcccctgcttccacagcaaatctggggcagttgcagctgctcaagcccaaggagctgaggagagctgccagagttcccaggcaggtggggagcctgcacccaagggcttgcccatggtgatagcccacttccagttccagaagaaggcaggcctctaggaagcacccacaatctacactttaaaaaaggagaaaaaatgaaaagcccctgaaacgcagatgcagttcctcaggggacttttcatgtcaggcagttttctgctgagatgctggatttgtgaccaaaaaagggctggtatttatttttagagcaaaaaagcctatttgtgtctctgggagggcttggatgatgtggccacactcgcctgccccaaccccaggggctgtcgtcattctaagggactgaagacggggaaaatgttcacactgttaacaccagtcagaggtgtccatggggcagtccctgagggtctgtgacaccctctctggtccaccagcccagactcaccccactagaggaggcgggtggggtgaggtggggttggggggatgataggcccaaggcccttcaccagtgcctgcctggcaggtcctgcatactgcagcctggttccaggaggtactttccctatgtgacttgagaagacggaggccaaagaaactggggaaatgcccaccaggcaacttaagcttttggaaatgcacgggaacaatggagacgaaggaggaaagactccaaaaggctcagagtcagcggtggctcgagccttacagggcaccagtgagaagcatgctgtgggaagagcctcactgagccttccagggtctagaggccttgcctctaaagctcccactccttatctaggacagctctagaggtcagagtgttcttccgcacactgaacgagagctctcctggactgatgtcactgcaaggttcaggagggaagtagttagggtccaaagtcccagaaaaagagggatgggacaaagagagaaaacatacttggggtctggctttgcacacagagtagcaccacatgaatgcatgtgttggggattgtcatcaccctccaggagatgccacccacccagaggaccccagagaaccaggaaggctgggcaggacagccaggcagtctttacacagagaggcctgggcggctggccaggcaggcagccttcccgaaggcgggactaggcgtgtgctgctggacatgactaatccaccccgggggacaggcccagggctctgaggaattccataacttgatggagtcctgtccctttcacggaagaaaatggacttaagctatagcttgctgggaaggaatctggaactgaagaccgttttattaagagtccgtgtccaatgattaggcaggacctacgtagagggagagagaaaccagtgtgagagaaatggtgtggaatgtaccatttaagtcacaagaacagaagaaccgcagactgagccaacctcctgcgccctggtggctgatgggcacaagaacggcactggagactggagccctgccccgtgcctggctaaccctgggtagggacagacccaccgcccgcttagaaaggtcacagaggcagaatgcatggatgccttggaaaccgcccccagcctgctcagcttctagagagtggccctggttcccactagcaagctccacgtgtgccctgcctgagcgcacgccggcatttcctttactgccctcaagtggcttcttttgaatttgagtgatgcccctgccctgtcccaccagccaggtgtggcaagcccaccaggcccctgctgactctgagctcatctcacccaggggctgtgcactgtctagtctcaggaaggcgatgccagcccttcctcctgggtctacaagaaaggaggtaccagaatgcaggacccccagtggaggggaaagagcaaacagcctcatctctgcattcctccagatcccccaaacaaaaagctcaaactctaaaaagcagaacctattatatacactgttgaggaggagaaaaaaaagaaaaagaaacaggctaaggaataaagtcttgtcctttctttccttttttggggtatccaacatggctccctggaccagggaggggcactgggcttgttcccacccacgtagcagagcggatgcctctgctggagtcacggatgcaaccgacgtgctactccctggcccctgagtgcgggcatgggaaaaacccgcccactggcggcctctcactctgggccacattccacaaggctcgccctcacccgcccatgaagccccagaatccctccagctgcaaatgctggctgtttgtggggggagtcacctggctgtgcagacagaaaggctactgccctatcttcaagtctcttcctactcccccacctccagggtcctcaccattcccctaggtaagcgccacactctggagcaggcaagcagcaggcctggagatggactaagtccctcaaagaccctgggggtcaggaagctgaggctggttgtgtggtaagaacgccccatggcctctgtctgcacttcccagctcaaatctttccaaaacatcaagcattcctttttcccctggagctattaagaaacacccacatgctccaatcctgggaaaaggaagccaggaaactaaaatagctggactgcgctcccgttccaactagacgaccagaccaaagcccaggaggatctctcacacctccctgagaccctgtcccagcccaggtagctgaggttaaacgggtattcctaagagggacataagctgtggggacacttctgctcacaaagacctgtgcatgacacttgggaagaaccagatgtcagctatgtgacaagtgaaagctagaagattcctaggacatgccctgccccatgtgcttggcagacctaaccccagtgctaatgacagcaaagccacagtactgtccacagcccacctgggacagtgtcttcctccagcctgctccacccaggtctgcagatgccctaggggtggtgggagagtggcatttgtgccctacccctgcctgtctcaatacagaatcctcaagcagctccaggctttagctggaatcacagctcaatggaagaccacagcccaagcaatagctggaatcagaggaagtggtagggctggcccactgcactgcatgctgctggggcagagggtggggaatacatggtggcctgggacacagctgggaaagcagcacccacccccgccatcctcctcctgcctgtgttccgttgctccctgaactagagcctggccccagaggaccaccccacgcctgcatcagtccacagcatcccggtctatggatagctaccaagaggggtgttcatgtatcacaccccccagcctcaatctagtgactccattcgttttcttctggtgattcatgtctcagggccgttgtcagcggaactaaccccgtagtataagtgacaaaaataggccctttcaggaatttcggctccaatccaaatggaaacacaagaacgggggggggggggggggcgggggcgcgggcctgcaaatcaactaggcaccaaaagaccaaagggaaataatgttcccccaccctgacccactcccgttaaggcagagctgcctgtaacgggccatggacatcagggctgccgggattcctggacccaggagagcagctgctgaaggagctacgccccctctgccccccgccctgagagtgcagagtcctgtgcgggacagggcagcagaaggctgtatttactggtgccagggtgtgggttcccatttcgggatctgccgtacgaaaccctcgcagcggcccctcctgagaggagaagcaccctgccggcccacgacagagctcactcagtgcacacagaaggcaaaggaaagcccctgctggccaggattgggaagacaaaagggagccaggcaaaacccaaggtggggagggcgcctgggaagaggggaaggccagagcccagatagctgcatgagcggccagggctggaccgccagagcctgggagcctgggagccagcggctctgagactgtaaatctcgccctccttcccgccaggacagctgttcccaggactctcagattacttgttgcacaatctttccacttttttttaaagtgggggagtgaaaaaataataaaatctcggcagcggcaggaggggtgtggggcactcgttcaggaaaccaggagcattcccactcctctcccaaagcagaggagcccagaagagggacgcagaggccaagggcaaaggccatgatcacacactggaaatcaggatgtgatggccacagccctctaaggtgtcttgtcttgtgagggctaaagcagcacactgccacgaccacgtcatgtcattttagttaatcaggtcccctgacaatttcagcatctggggtttccacttggtcactcagatcctcagatgagaagactacaaaacccctggtaggagaagtcaactagaaaacaggaggtgcaaaaacccagaggaaggcaagctggaggcttggctggcatggaaagtgaaaagtcagcggccaccaggaatgctaattggatccaagaatacagccattcaccccagtcactctgctgcgagtgggggccctagcttcgggtggcaaagccagcccttcctgggcagccatggggtgcagtgcctcctgctggctgatggattacaaaagcagtgtggggagagtaacggttagagatgaaagggtgaaggatggcgacagggaaggccaggaggccagtgagctgcccacggcattctgcatgcagttgtggtagagaatgtgggcatctggagtcctggagggtccttcagcccacttcaaggcaagtctcctcactcacctgggaagcagagggcaccaggctgtccaagggaagaggaatactgacaaggcccgaggtgccacctacccccaccccatctgtgcacacacacctcagagcaacatggctctccccagctgccgtgaagggtcctcaatcttccttggcacgatcaagttatttacatgcactgattattgagggttagcatttatttctagttagaataaaatcccagggatgggacaggcccgtgggagaacatgcaggagtctactgccaaaacacaggtttcccactgtggatccccactccccagtctgcctgagaccctagggccagctctcaggtggtctgcagcacgccagctcactgacagctgcaccagcctagcggcaaccccgttggccgtaaacacaggatgttagctccatctctcagcaggggctggtcgccaggccttctgggcaccatggctccctccctagcctctcccctgcgccagcctgagcatctgcgcccctgagaataatgaggaaagtgcacacttggaggagagcagtcccctctccactcccacctggcacccagcatcactacctgcctccacctcccactgaggctgctgctcagaaggtgggctctaatggggaacccagggtccaacgtgcagacccacggggcttgaaaagaagggactgttagttagaactgcaggagggacacgcaagtccaggtgcgtgtggagttagggcagattcaggagcagccaacacagcaacgagcacactctggggaggggtaggcaatggctggggcccaggtgatggcagggccagcagcagactggcgatgcggctggccagctgcagtctgctccacatccaccagaaaccagcgaagcatctccctgaagcggccgcactgcacgtgactgtgatacggggaaggccctggggacacgaagtctccactggtgcagaaagctgggtgtggtcacatcaaggtcaacagcacagcctggacccccacgcccacagtcctcatggcccagcttccccgcccaccatccagggctccgcagtgtcaacgcccttggccattcatcctccatgaccagaccctggcagggagagcataacggccaggccgagagaatggacactactgcacagagtgcagggctattcatggccccagggagacagttaacaaagagacagacagacagaggaacccagcaagttctgggagtgccgtctctgggctctagcatcctggacacaggaccgagctagtgccaggcacaggtgggaagagtttggtaagacacgtagaacacaagtcacctaacctgtttcggagtcttcgctgtcagaggagctggactcactggagctctccgactctgaggacgagaagcccttcatcttggaggagccggcaatcacatcaactttctcagctgcaatccaagcaatgggagctggtcaggcagggctgtggcccaggaagccgctctaagccatgggcacaccccatccatctggaggaaggaccagtgaggagcctgtgcacggtgggcccaggggctgctcccaactgccagctgccactcccagaacccacgtggtcccacagttcccatgggtagactgcttacaatggaatttcaaggttccttcaatctctcaaaaagtctcctttggggggtttatcaaggattcaagagaccaggcagaaggataatttcctaacacaaggtaccgctgggcataaggcttggattctcccagttactcttctagcaggggaagaagaagatccaaaaggaacatgctgccaaaaggtaacgcaaggcagggagagacccccgggggtctctcagcacagctgttcagacgcacgctggaatcatcatgtggtgtgccccaggtaggggcccaaggaccccaggagctagtcagggctggggacaaagactgtgtgcaatgccctgacaccgatcctcagaggaaagccgtaggccaggatgagctgtgtgacacaaaagagctgcctggaagagtccagaaaggatgccacaccgaactgtccctgctagagagggacagaggctggctcagtgctgcataacgtatcggtacacaggtcctgggaccctgcagacccgcctttcctccttccccaaagaggccggaggaagactcagcagcaggtagcctgggttgaaagcagctccggcttagaacacagctgcaggcaacaaggtgcagagaggccccagacaccaccagtcagatatgtagaaaggcactgacagcctaggggtgagtgcaatgtcacaacctttcggaggtttctgtgtcaagaacacagatattataattggaaaaaaaaaagggggggggcgcagaaagagtggactgagcaaggagggaaaagttactctgagggtgcccacagaaggaaccccatgcccagggggcccaagcacaccttgaggtttccttttcttccgcaaacaggaggtgacatagcgctccagctcacgcagtgtggacggcttcagggtctcaaagtcgatttcaatctcgtcggggttggaattcttcagggagggctcccgtgactggatgatgtgcaccacgcggcccagcttctcgccggggagcttgttgatgtccaagctgagctgccgcttctcctcataggacataggcttgcacttgtcctcttcctccgactcatacgtgggagggggcttgctcttcatgggcgctggctccttcttgctacgaagggacgatgcagacaccatcaagaacgggccccctgaggaagccaggcactcattcctccacatgtatgttggggggaaggggtgcccttcccataccccccacccaccagccttcacaggaaacggggcatgggcaactcaatctctgggagcacccagtggagaccgaagcaaactgtgactggaggctgcccaagtgggggatgcactacagccccatccttgccgcctatcctccccaaccaaacatggtgagctccgaaggctcatcctacagaaagaggcagagacagtgcagctaagtcctgtgtgcaagtggccaccagcctggcctgtgaagccacggctgcagaggggcagcctccgcacccaatgaggacagggaggggcagtggcccacacagtctcagagcaagccctggaaggagggtccccacccaggacaaattcaggggacacagacctcacattgctgttgctgctattatttttcttcgtctttttaggaggaggttccttggctttgctttttttattctcttccacttcctctttccttttgtgcttttcttttttcttttccttcttgtctttctcctttttctttggtttgttctgctggggctgagagagggctgcaagctgctcgtgcacggctttgagctgtagaccagacaggcaagacacacactcagggctgaaaccaccttcctgtcacccaagacccaggcgtctgctccaaaaaacatgcgacagcatgcacctggggcatcagggtgtgggcataggggaggcaggggaagggaaggcccccagctttgcgcctgtcatgttaaccagattcctaacaagactatctccacccattcactcaactccaaagactgccagtgtcttcctcaccagaggagctgatcaagccgacagacaccaagtctcacggccatcctgatcgcagaaggagggcccctaagaatctaagtaagagcacacggacacgtcaggcacgaagggcctgatgactggctatagggagaggagcaaacaggtagccccaggagagacgaacatcctggctcaacctcctccttccagatactgaaaggatcaagccacctcctctctgcccagaaaatggccatgtccctccccatccccaaccgcaagctcaacacatatatcatacatacgtgtatgatcaacatgcatttgacctagcaaaggggaaaaggccacaggtggtccagtgggaattatgctcccttgggaactcagaaccaagaacatctcttagaaacttctggggaggccaccctggtccacggactctggggattaagaatggagccaccaatgccctcacctgctcctggagctcagccagccgctgggctcgctcctcctcagagtcatcagtcgaactgtcactgtccgaggagctatcgctgctgctgtcgctggatgagggcggggccacaaccttggtgggagggggcactgccggggaggacacggccaccactggctcctcaggctcgtccggcatcttggcaaagcgcatttcgaacacatcctggtgagggaaagacatgctgtgacggctgctgggtacccaggccgcggcctagcatcacctgccctcattggctgctggggccaactcaacagaaagcaaccgagggcgaaagaggatggtgatcctgtctctttgctgccgagacaggggcaagggccagccaagggcctctgacaactcttgcaacactcttctctcaaatctcactttgaagaacaaggtggtccagagatagcggggcactcactccctggaggacaccgcccaggcaaggacatgagacccaggccactaagacagccagctcactgaagtctgagatggtactggaccaagggcatcctcaaaccccaaaacagttagccgaggctcccaccagatgcgtgcgggggagcaggagttgtctgtggtttgagagggcattccaggcagaggacacagcacacgcagaggtccccggtgggaatgtacctgccacaagcgcacctcctctaggggactaggctctgctgtagcagacacggttctaagtcggtctcctcattcctcagatagcccctgcagcacttaaccaagcagggctgcaccactggaggaggcatctccagcacacacaggacaaggtaagagaggtttaggcagcaggtgtggggcactgaggacaggctacaggagggagccactgtgcgcaggagaccctaagacctttcaaccctaagatccagcaatcagatggaaccacgtggggtcatggagctcagggaacagcagccatgcatggacactggggtctggccacacatactgccagccagctgtcaagtccctgccctaccccgggggcgctgtgctcaatccagtgatggctcaagacagaggcagaagcacaggcctggcttcccagcaggattctgggacccgcttcaaaccaggaataaactgatcatcgtggaaacacaccatggcaaagaccttcccccaaatgtgtgtcagtgcttcagagaggaccacggccctggaatcccctcctgatggctcaggaaacactccttgaggcttcctctcccacgctgctggagcaggcatcccatataactgtggtgttgattccctcccctccaggacacccggagtatgacttcttttagccaataactttttttttggagacagtcttcacccaggctggagtgcagtggcgcaatctcagctcactgtaacctctgtctcccaagtagctggaattacaggtgcacaccaccatgcccaactaatttttgtatttttagcagaggcagcgttctaccatgttggccaggctggtcttaaactcctgacctcaacagatccacttgccacagcctcccaaagggttgggatgaccagcgtgagccactgcgcctggcccaataacttttttctttctttcttcttcttcttctttttggagatagggccttgctctgttgcccagggtggaatgcaatcaatggctcaatcatggctcactacagcctcatcctcctaggctcaagagatcctcctgcctcagcctccttgagaactgagaccaccatgcccagctaaatttttgtgcagacagggttttgacatgttgcccaggctggtctccaactcctgggatcaagggatcctcccacaaggtggtctacaatgaaaagtgccaggattacaggcatgagccactgcacccagcaaatacctttattcagaaataactccttgagcaggtctgagacaaggaagaagatacacaacaagggacgaccagaggccatcaccagttagcctcccaggagtggggcccagggaggaaaaggtggggggcttcacatcagagtggaggccccagtgagagagtaagacagatccctagccctgcagcacccggctacgtggcaggtgggtagtgccctggatgtgggtgggctcaggtcccaaaatgactccaagaggcagctggggccacatgagcttctggaagagccaggcctgctgccaagcagcaggaagcaggttagagaagtgggcctcagaagtgccaggacatcatgaagggagataatcagctatgcctcccaggacaaagggagtgccctctactgagtggtagctacctcagcgaactggtctgtaagcctgggccagcttcaagacttgaggatgtccttgttcctccccaccaggtgatgactgttgggtaaatgctggggtgggggtgtgtggcattcactctgaggcctccttccattccctgggtgctcatggccctggctctccaaaggccccaacaacaaagagcaaaaaatacaagacacaaagtcagctaagatgagaaactaacattggtgggactgggaactgccagcttcctggcgtgtccagttgtgtgaccctgtcatccttccctgtctcttggatgtgagaactcttgttgtagcctgagtggggggcatcctgggaaacccacaagccagtgggcccagggctgctgtaggaaaaccttgctgtgtggcttcaacagtcacaagtctccaagtaccagcttgatggtagacaggaatgacgagctccctgttcaaggagctcagtctagctggaaacagaaaggtgaatgaacacatgggcagcaaggggttgccatgaactggaagtgtgctgagacctaagagtgaaaagaacacagtcaggggtgctatggggccagcaagaggacagtaaagcccaattcaagatgcaccgaggcaagcctctcacaagggaggatggtgatggtgaggggtagcaggcaccagcacccgccagggaacaccgagtgcaggcattctgttgggctgacagtctcttgagacccagctgaggcccagccccctgcccggcatcccacagacctacacctcactcctctggaggtctgggtctgaggtcatgcttctcagtttcagcacacctcactggtttcagacaagtatctcagctgtcaggctgtggaacacaggttttctcaatgacccgagaatttagaggctcagagagaaaaataaagtggctccttttccaagtaactttccagataatcccacttcttgggcccagccaaattaagagacccaattaagcaggtcccaatagctcctgaagaagtgagcaagggctggaagctttgtccctccccttccctgatggagaatttgctctctacctgctgatgcagagaaagtagagagaagtaagaaaaacaaagcctgaaatgccacaaacacaactgcccactgaagagaagcctgctctggaaccctccaccatcaactctgttgctcaaacagaaacacctctaccaagcactggcagagaggtgtccctcccaagggcaggcgaaacaggctgggccagaggcagcccacctacagcaccccccaccccttgcctgcactaggcccccttgagattgaggcctgtgtccactccagtccggcacctggagcccgtgtgtaggaagaaactctactgctgcagtgtctgtggtgtgacagacatccagtggccttggtaaactctacattcaggcaggcttactcccctctcagaaggagaaaaatgcaaaaaaaaaaaaaaaaaccacttaaaacccaaaaatctttgttggagaaaatctgcgaaaaggaggtggctccagggtgtcaggagaggacagaaaaaatgagacaaaaatgaggaaggaagggctagaacacatcagagggtgctttttcttttctttctcttagtaaagtagctcaaaacagtcacctttggtgctggaagagaatttgtttctgctgagttcttcctatgagagtagatgaagggcatgggtatcaatgtgagcagtgtgggcaaaagctgcgcccctgtcttctcaagagagtgggagagagggagcggtggaggagttgaaggcaccaatctgagggcgccactgccaccgggtggccctgaacaaaaactgcattgaaattaaaaagtctggccgggcacggtggctcacgcctgtaattccagcactttgggaggcccaggcaggcagatcatgaggtcagaagttcaagaccagcctgaccaatcggcaaaaccccctctctactaaaaaacaaaaattagctgggcgtggtggcgtgcgcctgtaatcccagctactcaggaggctgaggcaggagaactgcttgaaccaggaggcggaggttgcagtgagctgaggtcgtgccactgcactccagcctgggcgacagaaagagactccatctcaaaaaaaaaagaaagaaagaaagaaagaaattaaaaagcctgaactccttcaaggatgggaaatgcaaacatgaatgatgaaggggcaatgttgtttgtgaagaaggcacacagacaacaccaaagtgaagagagggcaacaattccccaagtcacagaaaataaaactaagaaacaggccaggtgccgtggctcatgcctgtaatcctggtagtatgggaggctgaagcaggtggatcacctaagcccaggagtttgagaccagcctgggcaatacagtgacatgccatctctaccaaaatacaaaaattagccaggcatggtggcacacgcttgctgtcctacctgagaggctcaattgagcacagcaggttgaggctacagtaagcagaatgacaccccgtttccaaaaataaataaataaaaaaaagtagaaataaaaagctccaagcctgagcatgcatttaaataacaagagccacatccacactagtaagaaagagaccaacaaacttcacaagggaagtgtttatcctacctcaagagtttgagcacatgtcctctgaacccaaggcagcccctgatccacagagaataggagagacagtgccttaggtccagtgggagcaggtacgggctgctatgctggggagtctaggacaacatgagaactagtgcagctgggaggcaggcaggcagtggggctctgcctggcaccgatccacaggtcaccaaaggctttccaagtcctcacttctgccctggaagcagatggctgcgacagccaggtgtgcagaagcccgctgaggcctacaatgagcacatcagcacctcatgatggctctgaccctgagaacagaagcaacccatggccttggggagaagatgctgggaatttttatgatcatttatctacagtcttaaagaatttaaaaaagaagatgagtctctaatcccagcactctgagagtccgaggcaggtggatcacttaagcccaggggttccagaccagcctgtgcaacatggcaaaacccatctctttaaaaaaaaaaaaaaaaaagaaaaaaaaaaagaaaataaacgaggcaaaattagctgggcatggtggtgcaagcctgtagtcctagatactcgggaggctgaggtgggaggatcgcttgaacctggaaggcagaggctgccgtgagctatgactgtgccactacactccagcctgggtgacagaacgagaccctgtctccaataattaaaacaaaaaaaatagaaaagatgatgatgatagtactaaatattgactttattctccaaaatttttaacccaatcttattattcaaagaaagtcattttttaaacttaggtatttttccttttttaaaaaaattaagtttacacatctatgctgtaacctcccctccccgcccacacgtgtacttcacactgtgcaccacccaggctctcaacttgaaggaagtgacccaggacccccaatcagaattgtggccatgtggaaacaaccactctgcagctagaaggctcttacggctctggtggagggatgtccacagtgcagatgtcctcagctcacgactgtgacagcgacttctcggcaagagtgccccccacccccaacccacttgagacaggtgtgttttgtagaagagactgggccatgcacagcacacacccggtcttccagccaaaagcaaatgagtgctggtggagggggcttgcagtggaacacccactctgctttaattgaataaccccaacttaaaatgtatgcactaggctgactttaggcacttttctaaagcaacatggcattatcccaaggaaagtgacagaaaaaaaaactctgccaaggcccacagaagtctgctcccacgaggacctcagcctgctctgctgagggtggctgcgccctcccaagcctcacctggagcttgcgggccatggccaccacctcatggtcaggagggttgtacttatagcagttggagaacatcaatcggacgtcagcaccaaactcctgagcatcacggtactcacgggcctccagtttagactggaaaacaagacaagtccctgttagctgtgtctgcccatgtgaccatggagaagtggctggcagcagacgaaagggatgcctagaagagcaagttggtttcttggctctcagtttggtcaagactctagtggggggacaggccatcaccccagttctcagcctcagggctgggactggccctgccaacatcccagctcacctgcctggctcgcaggcaggtggactcagaacccacaggaggcggagcctgagccagaaatgacggggagaactgatggagagggctgggcccagctcatcgtgatgacacagtacaggagctggtcaaagggacacagcactgttccctgctctgcctgccccatgcttgggactccactcccagaagaagaaacacgtaacaagtcttaaaactaaaaaagcctcaaaacactatggtgaaaatgtcggcacttacagcgtgcctccaacacagaggagacagcaaggccttctccaccacaaagaggctggcaaggccgccaagccccaactcccatggagcatctactgtgtgggcaaggtacctggggcactgggcccccaaggccagagggcttgtcttgcttttcctcagactaggggaaggggcagcacaggcatctgtagccacaatggccaagcaccaggtctcagagcacgtcccacagcagacagcagggggcgctgagtttcttcgagttggcgggaaaaatccacgcagccaccgttccagggcctgggcttcctcttggactaaaaggtctaggaaggttctgatgtggagggacagcctgcccaccttgtcccttccctcaggcacatcccgctaaccttgattgtgctcatgtccatggggtgcttgatgatgtcacagtagtcgtgtaggcccagtgcctccacgtccacaggcttgtagaagggccaggcgtaggcggcgtgcttcttggcaaacatctccttgaggatgccgctgcagcacttgagctgctccgagaccttgctgctcttctctggtgctgggtgctgctgagagtcgggcacgtccttctttggaggtttcacaggccggctgctctcccgccgctggcccagcttggtggtcttgggctccgggggcagcgagggtggctcgtgaatggggtcaatggtggtgggggtggtggtgtctgctttcctcttcactcccttctttgtctgccaagaacacggacgccaacaggcacagtcagaagtggcagccggcacagctgccctcagggtcacccccaaagccaggccctgtcttggggcccatcgctcacacagaatggacccaaagataattgcacaggcaaagggccaaggacaggcagatcgtgtcccaccactctgctctgcagctgggacaggacctgcctgtggcaggagaaagcataaaactgtgtgctcacttggaagccaagggacctctggaggctgcttagtacctaacaccagggcctctccccaagtgcccaggggaggcacaattcagagactatttagatggcccatctgcaaatatgcacagtctaaataaaagaggtgcagggggcaggaacccactaggaggtgtgacacaattatgggacctttgagtcagtggggcggctgtttctgggctgcaatttcaacacagcaagatctccccagaaacacccaccagtgcccgggacccaggacaggctctgtgtaaagcacgggcaaggacagggccgctctcctccctggtgaagcagccctccagagtccaggagactcaccttcacaggctgtggggtggccgcgatgatgggtgggtggctctgtacgggctggggagctggagcgggtgggggttgtggctgggggggcactggcgggggcgtctgcagtggctggggaggcaccactgtcatgacaggggtctggacgatgaggtccggggtgacggcagggaaggggtgaggcgtggcctgcacaggaggaggattcggctgaggggtctgggtctgcggaggagtcgatgcttgagttgtgtttggtaccgtggaaacgccaggttttgctgtccctacaaatcataataagacggcgagttagagaccatgctgacatccacatgctggctgacctcgtggggacatacaccacacacagtgaacgcacattcgcgtgttgcatttgcctgagagacgaacatcccagactccactctgccaaacccttccacctgtccctggggctcaaagaacagcagaaaaccgcacttcccatttcctagggcgtcctggctgcaactcccaactcaggcacaaagaccccttcatgaagcctggaggcccaggctcaaggagcaggaagcacatgctgacaggggacagagagcgggaaaacactcctcagagcttccaggcacagctgcccttgttcccagaagcactgccttctgagtaagagcttctggcagggagccggcagtagccgcccttgccaaggtttctggaaactggcaggcccccacctcctggaaccacagggggcagctggactgctgcccttcatgactggctcgagcgctgcctcccagcagctgtgcaggcagtccgaacacacaatggtcacgtggcacacccaaccagctgcaaaaagtgaggggttatggccagagctctaacaaaactgggtggaccagggtgagaatgtctaggagcataacctgggtcaccacatccttcgtgtgcatgctggctgccatgaaaatggacaaagacacccagtgccttcatctatcagctcaagcagcacccatgttccctgtgcatctcaaggagcaagggtgagattctgctgagtttcccaattctccttcctcaggcacaactcctgggcttctcccagactggaataggagatgccaccacgtctgtctgcccagcgtgcagcccaaacccctggtcccagggagtgaggaccaatatcctcatgtaaggataagggatgtgacttacatgaggatcaggaatgtgatctgataggtacaagagccacagggtgacacgtgagactagttctccttggttacctttgggtgcagcaggggatgtagcaaccccctttctgccaccacttcagaacagcatgggaggccaggtgaaaggctgctgctcagagaagcaaacaactcacactcagggaccacctcgcaaatgtcacccttctgcagcatggagttgcaaaggacaagatgtagccagtagctgctggagagtttcctagacagaatcatttcctagagtgggcagctctgccagctggcccctggaaccctgtgtcagttgggggtggtgacaggcagagatggatgaggagggctttcacttcagatgactgagcatcagaagcagggataactctgacaccagtgcattaaggtaattccaatcacaaacctcaaagtttagaactgagatgttagttaaaatgatttctggtcatgttaatgtccttaaaatggaaaagtaaaaaccacctatgatactggcagggtgaagtgttcaacaaacgtcaaagtgctttgagaagttacactttccttttaccctaagtccatcacctaccctcagaaaaggcagggcccaattatttctgcttagaagaggccacagggccacatgaccctatgggatggatccaacaccaaacccaatctcacatgtccaaacaccaacacggcatgcagtatataatgtcacatcctcctgccactcccagccccccaccaaacttggaaaagggacaaaggtcggggagaaagccaatttacttgctatttcagtactctacctgtttctttcctcccacgtcctcttccttttgcctggactatcatgatctcggtttcttctgtgggtagctcatttattttttgcaagaagagcttttccagagcttctgccattaagactatgtcatctccaggctggataaggagacacaggggtagagtcagagggccctcccctccccacctctgtagacagggcaccccatgccacccaccccctgcccccaaaacatgaagcgtcgtattccgggtccttccccgatctgcacccaaaggagccacaatggctacactaccaggtatcacagaggcttgtgttcccacaggtgtgctgagcctacacttgtctacctgcacctccctcatcttttaagctctggcctatctgagaagccatcctaatgccttaagcatctaccaagctcagccaatcactgaaaggggccctcctttgacacaattcaatttcaccagaaatacgtgaatgacacaggatttcttgccatgatacattagcagggccccagcaatgctccccaacgtacccccatggcagctcaccaggactctgggcactgcacatctcacactagttgaggggtcccactctgtcacctcatctataacatgctgttcccactcagttctaaactgagagcctggtctgcacattttgctcaaacctaagtggtgagagctgagactttaaaaaacacagtaaacttcaagaaactcacctacccatctcttctgggcatttttacccactacaccagcagaggtcaaaagctgagttctgtatagtgtctccctccagagtcgttctatttgaaagggttgattttaatcacatctgtggtctgaactgtaaacaaatgatctggcttcatggcacagccgagccgaaaggtttggctacggggttaggaagtgaccttcaggtctacatgtaggatcggggggacacttcatctatggccaagagttattgacagtcatgtccacagttccagcagaccatcacccacagagcaactgagctctgcgccggccccatcacaccctctctcacgtggaggtctctgtttgggcacacctctgcacaactacattttagcaggctctttcctaacaatttacatcacccaaatggactttgtcatgagtcgccactattctcctcacaccttctctactagacatgctcaggaaccaaaatcccaagggcaccagaagcacatgcttcaggctaacaaggacagcttgcaagttcaacatggccagcaccctcctcccagcaaaaaagcccacacccagtcacaggaacaaccacaggtctcattacctctacctccaagggtctcctcttgccagactccaagcccagccacacccaacacccctgcccacgggctcctgacatgcccactgccgtcgcctcccctcctctctccccagggcagctggacacccacccctacatctcaccttgttgtagatgtaacaatttgtaaacatagtgttgaagtcctggatacattcctgagcattccagtaatagttgttttccaagcgcttctttattgttcccatatccataggcgttttaatgatcttatagtaatcctggagagcagagagcaaaagtccagtgtcacctaggcagccaggcagcacaaacgctgggctggccaggctggcctggggacctcacccctggctgctccacaggtaaatccacgggagccacagctcctactggcatcagcaagtgatcttgagggggaacaccaaaataaagtggagcggggaagggttcctggatgctggggagtaattcagagggaaacgtacaagtttccaaccactctatcttgaaataggctgccttcattgaaatgcacattttttctttttatggatactaaaatattctttcacttttaataaataagggggaaaccaggcagccttttaaaaagcaatcctcacctagtaagacaacccatggcaggtcctacttgtcccatttgaaattttacatgtccataaaatgcaaattcccctggcgccaatgctggagtccacttgtaacccttgaccctggcactcctgcctccttgtcaccatgaagagctgcggagcataagtttccacccctagtcaaattcactggacttaacgtttctttcatttgcacacagtctaccactaaggattctttagtatccagatactgctgactgaccaggttaactgccaaatgacaaatctggacagccttcacaatccttagtttaaaaaaataaaaataaaaaatccaccatcccaaccctcaaactttcagatcttactaagtgccaaacagaaggagccagataacagatgtaaacgtcttaaagtgcccgaaatcaaaccacgttattctcacaacttcttctctaaatctaaacctattctaaaactaagttcatttttaaaaacaaccacagaaggaatgtgcggacagatcaagcagtgcctgggtttccaggtgtgaggatcacagagggccaggcagggggctgcacccagacagcaagtccccaatgactagaccagctcaggctgttggcctgacccaccgatagccaaactttctgagtcatcactctgactgaggacaggtgctcctgtaattaagttcaagtggtgtatcagaaccaaatccaagtggagtcccacggtagaggcacaggctgcaggtggagaggctgttgcagggagaagagagcaggtatactaacagcaagcactgaggccctgctcgggatggtagtggacagcgttggaaaggccagcacagggtatgggtgtggggtttttgagatgttctgacatccacgagaaagagtcaagggccacctgcttacatgtaaggttttggcacagctcatggaactgccctgggggtgagggctacaagtgcacacccaggcaccttaggcaagtggtcaagaggggagactggaagcagactatcggtgccactttctatgctctgacctcctttcccaagagaaccaagtctgaatagatctatcccagtggaaatttaaattttattctatggccaaaggccactgaattggccacagtgtgtcacatgtctcaatggccaacagaatagtgaagaggaattggggtgaaggcagagagaacggtgggggaagaggaactgccagcctggatagtacggtttggggccatgataggagatcaaaatgcgggtgaagacctagaaggcatcagaaaacagacaaggaatactttttagggtggccttattaacatctcctgaagaaggaagtccccagaatacagatttagcatgatgatgctcctgatcaagcatcccctttggctcagcccccaccaaatgccctgagaccactctcactcagcaagctccttcctcagctcctcactctcccatctctgaagacatcagatcagggccaccatggatcagtcccttcttcttatgtcagagctaatgagggcgacgtcaacagtcatagggacaggtagattcacactctgcctggaccaagaacgtcctggccactctccagcctgcacttcagagactgaccttgaactcccaaaccccatggcctaaccaatcacccatacttgtctgtcccgctggccagcactgttccctcaacctcaactgggatgctgctgcttctcggcaatctcaagtcccccagcccttccttctcctgtcttcaccttctcagccctccctgcttcagttcccactgcgttttcttgtaacaagctgacccctctgctattctggcactgatgcgtttcccttcaaagccaagcttcttgaaatggtggcttcacatcctcaccttctcattcacaccgtcgcaatctggtttctacttctgtgtcacgtcttcctaaggtcaccaatgccctcctaaaggtcaacaggatgatcaggtcggaatcctcatctctttgacctccctgtagcttctgatgttggaatctggggaaatgctctcttctgtaggccttctgccttccctccaacccctaagggcctcacaacgctctgggttccactccagtccccagttccttctctcctggttctgtgcatctgctctgagaatttcactctcaactatggaccctgtccagcccagctagagattggtgcagtgagctcccccaacagtctccctcccgcaggccaacacagctgactgcctccactcctcatcttggtcaatggagagcgtggcgcctcttctgcctccatacctttcctgagccatttcaagacccagacacgtactgccctgttctgattatcttcccccgagtgcttgacacgtattcagtgaagcaatagcaccagacagttcttacagacacaatgactttaaacttgggagtaaggatgcctggcagaggctaaggccgctcctacacaccagtggctctggtgtgcacacaccagtggctctggtgtgcacacaccagtctgggtcagtggctgcaaccacctaatgcacttgccagggggtgtacaggacttggcaaacagcaaaggacaatttaaagacaattagtctttggtgctttaaagaaaaaaaaactgaagcatttattccatctgctccctgaggttcagctggagatacaggtttgcttgcagaacagtttgctagggacatgggcatatggaaaactctccagggaaagagaagaggggcgggctcacaaaagcacaagagcaagtgtgctgtagccagagggagggagggcaacaccacctgtgcagctgcagccacagccacctttctccaactggggacgcctccatgtacttgcactccctgcgaggtaatcccactatctttccccaccgtgtgctccgggtgacagtgacgatgatgctaggtgaccactactgcagcaagccaattcccctctagcatagtttgatcaactacgtctacttatccttgatcaactatgtccacacctgagaaatgaaggggctaggatggccaagtgctctgacttcaactcaccatggaactggaagtagatctgtgggccttcctttctcccactgcttcaacctctacacaattttccccaggattccaatatctaagaaaccagttattgttaagccaattagctcattctttctccctgatttcaactgatcagaactgctgaaaccactcactcaagggccctgcagctctcaccatgattccaaatgcatctcctaccctccccccaggaactgccctgaccaggagacatgcaggagacgacctccaggacggccaccctgggccctgcccacactactcacagggaggttcagcttgacggcatccacaggctgctggaaaggccatgcaaactggtgtttccatagtgtcttgagcaccactctgagcaggtattgcagttggttggtctgcctcttgggcttgttagggttggaggtctctgggggcggggggttggtgctggctgcgttggctggctggggttgggcctgggcctgtgttgtagacatttgggaagtttctagtccatcccccattactggcagatttctcaatctcgtcccagggccgctctccgcagacatgctagtgatcccatcacattcttcaccaggcactctacaaaggaagagaagagcccccgtgagatatcagtcagcagatgggcaccgctcagaatgacaagtccctctggctgtggtctccaaggactgagttccctggcggtagctagccaagttggccagagggaccaccccatgctttgactgaaagggttccaatgtctcctctccccaaagacttaccctccagcagggaggagaccacaaaccaacagaggaggcagagtgaggtggtgagagcccactaggagccagcaaaggctctgggaactatgaaggtcatggggaaggatgtacaatgaagccacgtctcacaaacctgcacatcccttttcccacctgtgagtttttaggagatgctgcctgtgtgtggaaggggatgatgtgcaggctcccacatatgacatttacattaaaactccttgcatttatcacacacaaagcatcgagcaaagtcaatcatttcatttggtgggccaggcaaggagaagcaggaaggctgggtctgcccacccatggatggcccacccagtccactgccaagtgctcagggcaaagccacaaacctactaagaatattttcttggtaacttaaataatgcaggtctgctgaggaaagaatctgcatgtttactgccgataaaataaaaatgaatccatactagacctaccattttcttttttttttttttttttcatctctagtaataaacctaagaactcagtggagatatcattctgggatgaacttttagtgggttcagaagcagctttatgcctagcacacactaggcaccctagctgccagtgaattactttgtgtaatttatttaaaccaggattacacaaactttttttgtaaatgcagttctggcaaataatcctattttaaaagctccaaacggagaatttgctacataaagcaactccatggactaggctgtggagataggaggccagtgagataggagaagacacagggacaaatgacacaagccacatatcagcttgctgggaaccttgggtccagtgtaccagtcttggtccagacacagatagattacaggacacaccaagtgactggacacaagtattggtagaaggacagcatcacagacaaggaaacaagtcagtggggtttaaaccccactcacatgtggagtaggctggagagggcttccatgcagcaggaccagcaagtccaaagtgaccaatggggacaagtgtgatggggtcaaggggaggggaggcctaaaggcactgtggaagcctggatcccaagatggagggtacaaagagtgaggccaaggaatgccattcagtttggtttctatgattagatttctcctagaaagcagctccagaaacatatagctgatgctgcgcaccaagcacacgccaggtaagtgatggcaggcaggggcaggagcagcccagccacaaggacacaggcggccagggtgcagagccaagctgtcccaaaaggaagcagaccctataaattttccattaagtaatgacattctggaaatctctaagcaatgcccttgaggcaagatgaggccaaggacttctagaacttctgggctgggccatgcttgtctctttccaaaaagacttgcagcaaagccaagggacaaaaactcatgtgtgctctaggccagtgaccactcttcttcaccttctcaccaggcctagataggcccttgagccgaggaagctgaattttcctttttttttttttttggagacagggtctgtcgcccaggcagtgcagtggtgcaatcttggctcactgcaacctctgccttccagggtcaagtgattctcccacctcagcctccccagtagctaggattacaggcgtgtgccaccatggctggctaatatttgtatttttagtggagatggggtttcaccatgttggccaggctggtctcaaactcctgacctcaggtgatccacctgcctcggcctcccaaattgctggggttacaggcgtgagccaccatgcccggacagaagctgaattttctgttcacaagaggaaaaaaacagttttctacagaaaacctgactcttgaaccttgcctcatttggtgttttaagccattgcaaaagccaaaacacccctccctagccagccagctcacaagtgatgcacagtaacagttaaatcctcaaaaatgctaacattgcttctggcctcatccccactttacagatagggaaaccaaggcagagagaagtacctgacccaggagtggaaacaccaggtctaagcagatagagtggcccaaaacctggcatctgattcctgggcagttaagttggcctttgaattaaggaagtcctcattagtgagctgcacacacacacatcagaagtgtccaacacagatggtcgtgacacagtggccatccttaacacacacacacccaggcccctgaggaaagaaactgctggaggttgtctgttcaaatgtgaaggtatgacatgttcgacacataagacaaacctggtagctaccagtaccccaaagtttctttaaggaggctctgaagataaccaatgaaagtgacatctggccgggcacggtggctcacgtctgtaatcccagcacttcgggaggccaagaagggtgggtcacttgaggtcaggaattggagatgagcctggacaacatgatggaaccccatctctactaaaaagacaaaaaattagccgggcatggtggccagctactcgggaggccgaggccggagaactgccttgaacctgggaggcggaaactgcagtgagccatgattgtgccactgtactccagcctgggcaacaagagtaaaactccatctcaaaaaaagaaaaagaaaagaaaagaaagtgatatccatggccccacaagggagatcaccataagatacctgggactcctgcacccactctgggcctgtgcagcacctgcacctcaagggaccacactgacctactgctatgcccacagccttcccatgactacaggaaagtaagacccttgggaaacttcaagagcccactcttactgcaatgacaagaaacatgaggaaaaccaaccacttctagtctgttatggggcaagaaagagaggtacagtgagaagtcctatgtgagacccagatgacttttctaaggcccagatttgatatgaggtcagcctccttgggcgaattcttcccacagcggttccccccaaccccacactgccccaggcccctagcatctaggctctaacaacaagtcagccaaccctgtcaccttcagcctttgatctgctagccctactgccagacagatggatggatgcagacataggctcacagactctctctctctctctctctggcccatagcatctggtgcttccctcatctccatctactgagttccatggtcagccccctaggaacctgaaggcaggctcatctttatttcacttttatcttcccagcacacaggaggtgaacccttagtgaccatacccacattgtcatcctggggcttccagctcaatctcaaagctctggaaaagcaaaacagttcacactctcacatggataatgtggagaccaccagactcagtcactcgctcaggcaacaggtcctaacatgccttgccctaggactcagcggttgacatggcattctcccgagtgattaggcaatacatggggtgaatactgtggaggagaagggcagggctgctctggccatggacggggagagggatctgcactgacccgagggacaggcggcatctctgaagaagggacagagaatgagaccagaggcgggggaagagtgtgtgcgcttctgtggtgggggtcaggcaggcagtggcaagagaaggcatgcctggcatagataacaggagacaacatcttcaaagttttccgttgaaaagattaaaaactgctgctccctctccattttcatactgacctgtggccaaaaagcaggagccaccattcaccacgttaagagttagctgaaggtcaaggaaaaggaaaagaatttcgcttattgtttccaatccaaaggcggctacataatcgaacttgatgtcctacttttgtatctacttccaacagaaaccctatatcatgttcccagtgtagaagaaaaggatgaagcaaggttagacaatgctgtagttcccaaactgagtgcccaggtgccttggggatgtcatggtaaactcagatggcattgcaggaactatcagcacaaggcaattgatcatttcaacaccagattgcactatattcaacagtgtcacagcctgcaacacttgatcagcaagttgctgtaataaaacaaagattgtccaggcacagtggctcacgcctgtaatcccagcactttgggaggccatggcaggtggatcaccttaagtctggaatttgagaccagcctggccaacacagtgcaaccctatctctaccaaaaaaaaaaaaaaaaaaaaagtacccaggcatggtggtgtacacctgtggtcccagctactcaggaggctgaggcaggagaattacttaaacccaggaggtggaggttgcagtgagcagagatggcgccactatactccagcctgggcaacacagcaagactccgtctccaaaacaaaacaaaacaaaacaaaaagcaaaggtcatataaaaatcaacatgaacacctgtaatcccagcactttgggaggccgaggcaggcggatcacgaggtcaggagaccgagaccatcctggctaacacagtgaaaccccatctctactaaaaatacaaaaaattagccaggcatggcagcgggcgcctgtagtcccagctacttgggaggctgaggcaggagcatggtgtgaacctgggaggtggagcctgcagtgagccaagatagcacaactgcattccagcctgggagacagagcaagactccgtctcaaaaaaaaaaaaaaaaaaaaaaaaaaaaaaaaaaatcaaaatcaacatcaacaggagatgcaggtagtgacatccaacctggttctaaggtttgaggatttgtgcagcatccaacaggcagacacatcctattagaaagtaactatgggccaggcatggcgggccacacctgtaatcccagcactctgggaaaacgaggtaggcagatcacttgaggtcaggagttgcagaccagcctgccaatctggtgaaaccccatctctactaaaaatacagaaaaatcagccaggtatggtggcgcatgcttgtaatccagctactccagaggctgagacaggagaatcacttgaacccgggaggtggaggttgcagtgagcagagattgtgccactgtactccagcctgggcaacaaagcaagactctgcccaacccccgccaaaaaaaaaaaaaaaaaaaaagaaataactatggttatgtaagaataaaatatatattcctgtttttttttttcagacagctacacagttgttgagacattggtacttattctgctgcttgtgcttaaccacctaataaacaatattgttggctacttcctctggcctgaggcatcacagaaaaaactgagacgtttaaggatgttgtgaaccaagaaaatttgggaacttctgggttaatgaaaataaaaatgtaaattttccctctaaattcatagacctctgattaagcatgcctgttttcttttcttttttgagacggagttttgctcttgttgcccaggctggagtgcaatagcgtgatctcgactcactgtaacctccgcctcccaggttccagcaattctccggcctcagcctcctgagtagctggtattacaagcatgcgcctgcacgcctggctaattttgtatttttagtagagatggggtttctccatgttggtcaggctggtctcaaactcccaacatcagatgatccgcccacttcggccgcccaaagtgctgggattacaggcgtgagccaccgcacccggctaagcatgcctgttttcaaagatgttctttgcaatcataatatttaagtgaattttgggaaaatattagggatagacagtacttaacagagaacacaactgtaatgttttataactctgaacaggaaacaaactgtttccttggactaactttatttacaatctagtcaatagttcagacaaattagaaatctaacaaaagatatagaaaacaaaaaatccaaaaccagctcagaaagtttgaacactttctgcaatgatggagtccctacttgcaaagtggatggcagcaagccctcttcactggtatcctccatcaagtcatagttctctccatcgcccgtcccaattagctcctatccttcaaaggggctttcagggtctccagacaggctttgttctgaacccactcatcacaaagcagtctggccccaagcaacctgttcccagaccaggaaaggagattagaaagcaggatatagatagatacagacatgcagggcaggcttagttctgggactctaaaggcaagccagagaggaaaagagaaagaccacaaacaactgcccagaatctgctgattgctggagattcagttcccagttccgtccatcacaagtcactgagaaaaccaatgggttgggaccagctatactttgtatttgcagttctacctgaagtcctggcctcccagcggacctcttgaaacccagtaatcctgccttcattctgtctggtctgttcagactcacccctctcctaaagtgatggagcacacaggtagaaagacgccagggaaggcagaagcagtcgccaagacgatggctggttaaaccacacttagcagagctttatgcaagccatcatcacacagacctgcaccagggcctagaagagctccacaggaggtacctgccacttcttgagctgatgctgttatcgagcacttcatctgtattggcttagttatccacacaacaaccctaaaaagcaggctgcgactttatcatcttcatcatcatccccatggggacagaggcagagtggatggtggcctggttggctggacgtcatttggaacagtgtgtgcttcaagtcctctgctccacagctgtctccactcaccaagcacagtggcaacacccacaaggggcagaggcccagtcatcctacacgggtctttggcttggccagcagcaccacactttgctgtacccatcagtggcctgccttctctgcagaagcagctgggtgccatgtggcccataagctgggtcttaagtcagacttctagcagtagtattccaaagaatttcatcctcgtaaacaaatcagagccaagacctctccctgcagcacctggccatctgcttacaatgagatatatcccgtgtcataggtgaaatctaaaacataccactgtgctgaagtcatgaggtgtgggggcaaggggaagggacaccaagttgttatttatgcttcccaagcagtaagatgcctgaggggacatggcttaaatttgttttattccatacagactgccagccaatgccaactgactacagcccctcatgaaatcacaagttcacagtcacacatacccttcaggtagaggaggtcacctctccaccgctccaaggctcttgaataaacaattattttcagggaatgctagattctgcccagggacaaaaacaagaggatgagggaccctgactggtaaaaacctggtaatttctcaatacaattcaatttacagcaatttacatcttatcttgtcctagaaacatctttgctgaaatgctgattacacaacatcaatatcagaaggtctgttcccctcctaggtgctagagtggcatctacttcaaattcctgacagcggcttctttaattgtgcaatctgtgtcagtggggaagcacaaataggattacttttccatctgactggctcaggcagctggtgagaacagcgctcgtgtcatcagccagactgcgccgcctggagccgggccagtggccgtgcgccgaggcagctcttagaggccttaatcctccttcacgcagtgtgtatacaccctgccccccaccccttggaccagccaagtggtggggccccattacctcttgactctgcagtaccccagaccctgcaacttgccttggattagacaagccaaggcagagatatactggccttgctgctaggggagagtgtgagccacactcaagctctctgttccccactggaggggacacaggcacacaaggatcttgcagtcaggaggccaggaaactgggcgggacacaatctcaccaaccagaattccagtctctctgcttttgaaactcatcagcaggctaattaaactagtagcactgaaaatgctgcagcatcttttcactgcaaaagctgccagcaactggagggacaagtggctcaggtacagtgaaaggatccattgttacatgtgggttacatcatgttgctgattgttaaatctgggcggatggattcatgaaatgtaaaatgttcctgtgagaagcatgtagcaaaaacaaaactttgacatggacaagatcaaaactgttgggttggccaggcatggtggcttacgtctataatctcaacactttgggaggccgaggcgggtggattgcctgagttcaggagttcaagaccaccatgggcaacacagtgaaaccctatctctactaatatacaaaaaattagccaggcatggcggcgtgcacctgtagtcccagctactcaggaggctgaggcaggataattgcttgaacttgggaggcagaggttgcagtgagccgagattgtgccactgcactccagcctgggcaacagagcgagactccatctccaaaacaaacaaacaaacaaacaaacaaaaactgttgggttaaaatgtattccagcaggggcaggctaggctaacttttcctgtaaagggccagagagcaaatattgtcagctgtgcaggacaaacagcctgttaaaatattccattctgccatcatcataaaatgaaagcagccacaaataatcctgaaacaaatgagcctcactgtgtgccaaaaaaactgactggcctgcaggccatagtttgcagcccattccatagatttctagactttgtgaaggtaagagaatgtgatgttacatcagaaatgcaggatgcaaaattacagatgaaattaggtaacaatgccaggtgggtgggcacaaagacccacagaatgaagccagaggtggtggcaggtgtgtggatgacaacacctacttacactgaaaaccaaccaaccactcggccacacatgtaaaaactactcagcctctatgcaatctatcccctttgacaagcccatactggcctcttggtgtctgtccacttctacctggtaagttggcccttcaggcactacacctggccaaattacaggctgaaagattatgatagaaatgtcattaattcaagctatgcattcccactgactcagctgtgcccttcacagttaagagtggcattttctccttgttgactcctttaaagccatttccccatctcctttacctgtcttcactttacaccttttcagctattcatctttttcaacagagctgtggggtatgtggcactgagattcatccacaccataatatgaaacacagctggaagtgctgacacacacagtcccagctcttaggaggctcaggtgggagcattgcttgagctcagcaaggctacagcagttaagctatgatcatgtcactgcactccagcctaggcgacagagtaagactctgtctttaaaaataataataaattaaataattaaattatgaaacgcaatgtgacatgactgtgaatttatggattaaaaccctgctttgagagagactccaagatggccagggagcaatgcagatcacaaagtaggggctggcagtgagctgggcactttgctctgcttaagaggggtgtttcctaggaggaaggaaatacgggggacacacttggagaatgaaagactacaaagacagcaagagtgggagaggaagttcacttcttagagggcacgaagaattaaaatgagaagaaagtttaagagtgaaagacaggtttagttaaactcagctgataatacactcctgggctgcccctggtgtcaatcagaaaatttctccggatgacatcacaccggtcttctgaaattttcccattgcaaacaaaagcataaaaactaagcttataatcctcatttaaatttaaaactataaaaatttcctatataccaaacaccagggaaacatgttatgacagcttctatgtgagtggtcaagatcacgccctttgggaatttgggaagccaagagagagatgagtgaaatgcaaacaacaatctgcatggttcatgaccacaatgcctgtggctgaaatgttccaaaacacaccagcttaacacacagtcctgttatgtgtaagtggaaacaacactgaactcttgaaacagatccacgagtgggaatggtgacattccaatcaactgctctaatttcacccactgggaagccgcccgggtgagtaagcaagagtgtatcacgcctcttaagtttcttctcaaagcagcagagcagcggctgactcaaggtgtccctggaacctgcccacactcactggggacacaaaagggaacagggctggcacaagtgctttcagagacaccatgacccaacacccccaccagcaacattttagccatgactagcaagagcccttgctgggtgggaaagccaaactagacctttgatgggcacgaggagagatggagccaggaacagacacatgcatgaaaggcaatagcacacaatgactcagggtccagaggtatcaaagcctgggtatctcgatgaagagctgacgttaatgggatgatcttttcttcaatgatattaccctgggcacttcattgtgattttaagagaaagatctggaaaaaacgttacacctgtcagtatctagacacgctcaagaaatggcttcagacaagaagacttttcttctcatcttgccctcaccactcattaggtacagaatccaatctatggggatcaggaggaggaacggcatcacttttcttgaagaaaagggaacgcagaatgtgacactaaattaacgtcagagcttccagcttccaaagaccccaagtccctggctgacaaagcaggaactgaagactgacccaagacccaaagatgaccagtcagtgagagctgacagtgtctcaagtgctggatttatatctgatacacacccccaagggtacacaaaaggccattcttacaactttacagaagcctttgatggtcaatgccgtcctaggtaaacaggccaaggggtccccaccttccaggcaacattaacttcactttcaagcttctcttccctcaggtaaaagcaagccacccagataacccattccatgcactgctgggaggccctccacacacattcagtgtctacttctgtccagacaactgaactgaatctgctggagagggatgcttggaagtaaatagctgtcaccctctcatctcagtaactttcagaatataaaggagcagaataaaatgaaacccacaccacttcagacgactacagctaaggaagcaaaaaacttggcaggcataatcactttgtgagaaccatgttcttgtttgcccctaattccacctaacttccacaaagtaaataacccacagaagtcaagcagcccaactcttacactgacaggcgagtacatggaggtgctggagagaaaagacacagagcatgcctcatctcctcactgtgcacacccttcctcctctctccagcccctgcaggcagcagccactcacagagcagccctgggtgctgtgccacaagggagccttggatgcagccaagttggcatcttgcagactcaagagtccatcacacaacctaagttcactcccctgcagatgtggccagcttgtcctctgagtccactgaggagtaacagccacttaactggtaaggaattttcagaccaatagaaaccaaaacccagggcagcgactatcacactcgtatggaacctgtggcagtccctaggaacgcctcaccacctttctactaaaaatctgattaagttcaggagttcaggcccagcctgggcaacatggcaaaaccgtgtctctaccaaaaatacaaaagattagccaggcttggtggtgcacgcctgtggtcccagctactctgcccagctccagctacttgggaggccaaggagggaggatcgcttgagcctgggagacagaggttgctgtgagccgaaatcacaccactgcactccaacttgggtgacagagtgagaccccatctcaaaaaaagaaaaaaaaatctaaggatgtagaaataaggtgcatcacacataaataaagccttagactagggtctagcatacagaatgaaaaaattttaaaaagtgcacatccctgagtagaaaagagatggcaagataacataaaactttggctaatttttattactactttttacatttgtttttcccaactccctgaaataccatcaacatagttatcaatcaggaactaaagggaaaaaatactttaaggaggacttaaatggccaggggtgggtgggggcacgaagcacagcaggagagacacctggcttagttaggatggtgcccactctgagtttagtaactgctttaggaggcgtgtgtgaggagagccagagagcaacatgctggcagcatgagacccactggccttccctagctccctaagttattcccaggttctcccagatgccatgctaggcttgcctcgtccagggagggagccacctcaaggaggtgccccattaccctctcctaagtcccaataccctcccaccaattcttcccacgcctctgtcctatggacctaaggccaaaagccagacaaagggggacaaaggtctttcctcaggtatccagtaacacaaatcagtccagtcccctccaccccgagcagatgagaaaaggagcatagcccctcccctgcaccggcctaacatggaggagccaacacagtgctgcagcaagaccataatcaggcaccgtggtactcacaggctggaggccttattagcacagaagacgagaaagagacttcagcagcagagacagggaagtaatagggacatcaggtggagggcatgggagaggaaggtggctgctgcacggaggaagtgaaactccatacttgcacatctgcgcatgtccaacagaaatacaatgtggctactcatgccattttaaaatttctaggagccacattaacagagaaagcaggtatgcttacccaaaataccatttcgacatataaacgtgtaacatttttttccttactaaatctgtgaaatctaagtgtgcatgccccacagtcacagcacaattcaggtgctaaattttcacccaaaatatgtgatctgtatttagattccataaaacttgcagctgaaaaagtagattcacatacccgaggtgtccccaacatatctggatgtttttcactaactaaactgagcatcagctttgaaaattaattagaatttgattaaagtaaaaattcatttcctcggtagcactagccacattttttgatgctcaagagccacgtggggttagtgctgacctcactgtgaaaatctaagaggtttcactggctaggaggccaagggcaggcattttaggaactctgctctggggccacagggatggggaatactacacattcaggctggttagaccccagtcagtttccacacctaccacttttatcacccacagatccacctgtgctttaaatcaacctgctcaactaaaatatatctatttaaaagaaaacattaacatagcattagtattaacacatcacctgtgtgaatgggggaaacatatgggaaatctcaacacaggatacaatcattgttgagtttcctgtatgcaaaaaaatgtttatgcggttttagaggacagtgcctttattctttttttttttaagacacagtaaaaactttaataatcttatttttattatggtaaaatatatgtaacataaaacttaccactttaaccattttttactgtatagtttggtgacattaagtgcattcacgctactatgcaatcactatctagctccagaactttttaatttatgtatttattttctttaaagatggggtcttgctatgttgctcaggctggtctcaaactcctgggctcaagcaatattcctgcctcagtctcccaaagtgctgggactacagatgagccaccacaactgggcgtttcagaacgctttcaccttgtaaaacaaactctgtaacccatatatccactaaacactaactcccaatccctgcctctggcaaccaccattctactttctgtctctgtggaagtgactcctataggtacccagcgtgagtgaaaccacaaagtatttgtctttttgtggttgtcgtatttcacttggcataacgtcttctaggttcatccacattgtagcacctctgaatttcttttttttttttgagacagtctccctttgtcgcccaagctggagtgcagtggtacgatctaggctcattgcaacctccacctcctgggttcggcgattcttgtgcctcagcctcccgagtagctgggactacagacacgtgccaccacgtctggctaatttctgtatttttagtagggactgggtttcaccaacttggtcaggctgatctcaaactcctgacttagatgatctgcccacctcggcctcccaaagtgctgggattacaggtgtgagccactgtacctggcctgaatttcattccttcttaaggctgattaatacttcatattttgcctatctatccatccatcaatggacacaggttgcttctataataccttttggctactgtgtatagggctgctatgaacatgggcgtacaaatacatgtttcagtccctgctttcaaagagaatgcccttaagaaatgtttgctgaagtacacagaggtaatatcacatctgcaacttattaaaaggatttatgggtggctgggaaggatcgcttgaagccaggagtttcaggctgcagtgagctatgatctgccctccagactggtgacagagcaagaccacatctcaaaaaataataaataaaaataaatagaagaagaggagtgaaacacaggatccagttataaacttggacaatcacccatcaaaaatcagctccttcccagaagatgtttataaggcacaggcagaattcatccggaactgcagacactgccctaagcccatccacaccctccgctggcttctcctgctggtgtgcagagcacagaacagcttcacagtcttcccttgtttttaccaaagcagccgagcagctggtgctacacaggctggtgcactgcccagcagacacacagggccgccgaagggaggaagtcaacgcccgagggtggccactaagccgtggcgggtgcctgcccctgcagatggaggagggctgagttctaagcacactactctgtgaatggcatgaatgagctctttcactggcaccagagagaacacgcaacagtaccatctgctgaggggagggaaagttcagaggagcaggcaccgactcctcaggcttccacagccaccaggtccccactgtgtcaaggcggctgttaatactcaagtcccctcctccactcctgaacatgagagttaaacaaagtcagctacagtctcttggtccataacaacctagggaaagcaaactacagaaccacgttagaaatgcttcacgtcttttacctcaaaatacctttgtttagtaaccccactccccgacacaggccccatagctctgttttctgggttctgacaactagtgccctaagccagaggccaggccctaaagagacaacctaggcaggcttgagatgtttctcccacgacctttccaaatgattccagcagaaagccagactccttagctacttaaaatcagaaaacagctgggtgcggtggctcacgcctataatcccagcactttgggaggccgaggcgggtggatcacctgaggtcaggagttcgggaccaacctgaccaacatggagaaaccccgtctctactaaaaatataaaattggccgggcatggtggcacatgtctgtaatcccagctactcaggaggctgaggcatgagaatcacttgaaccctggaggcggaggttgcgatgagccgagatcgcgccactgcactccagcctgggcaacaagagcgaaactccatcttaaaataaataaataaataaataaaataaatcagaaaatagatgggtattacttcccactcaaaaccactctcaaggtagctaggttagtgcaaaagtaattgcggttttgatccaaaaaaaaaaagaaaaaaaaaagccaaaacagcagttacttttgcaccatcctaatagatctgatgaaaccaggagaatggaagctaggaaagatgtggctcacaagcaatgggagaagtgtgcttgtaaggacactggagccccccagcctctgggttctgcccacggggcaccacccacagccaggtccctgcctgcatagacaggaaggaaaacggggccacttcacagggtgctacagggctctcagcaaggggctcaagtgagggaaggctttccaacgaagcagcctgaagggcaaggagtaattcacatttttgttttagttcttggagaggtttggtttcaaggcaggatagacacattaaaaaccatatgactgccttaggcttaagggtagggcagggggtcacacgctaggcatatgaagccctaatgacaggtgtgtgtacttctgaaacccagaaaatgaaatccctaaggacttcactgaggatccattggagattaaaaagaagctcccatcgaggcctcctcctgctcgagtgacatttaacaccaagagtaagctgactgacatgtggattattaaaagtgtattcaaagtcaatgttaaaaagttagtactagaccatttcaattctcttcaagacgcagcactgacttagaatggaatttttgatgcgcctccactaatcctgttacgttagaaaacagaaatagaatttgttcccttggcgttcactggttgccatagaaatcaaaatgcattatactttcaggtgaagaaatgcatcacgagtactgaaaaagaaaaactctcatcaaatccagtacaaactcaaaccacccctttaataataaatgggtgcaagtatacacctagaacaccacccaaacagatgtgttccagccctggggaagcaatttcattcatttcaacatacagaacaccaacccctagaaagatgctctaggcaaacagctaatctggccaggctgggactctgcctcagatggtaaagctcacaacatatacacccgcttctcatctaagcctgcagttttcatgtttccagtgtgttccatctcatacccatatgtacgaaaacctaagtgtaccccctcttccctcataaacacaggctccctcatgagttggttttgctatctctaggggatgatatacaggctattataaatttgatttcaacccaaggaaacatttgagaggttttaaaaagcgttcttcataaatgaaaaagaaaagaaaaaactctattgcattaaagacgcatatggtattttttttactggtcccagatggaaagaagtgggtatgatggcacttcagaccctgcaaaacccccaagtcaatgggttatggtaactgtgacctgaccattgcttatcacccaccaccaccaccccgatcctgttcctaacatgtgtctactgggcctgctcctgacttgttatgccctgctcctggagtaggcctataaggagatggtgttaaggtgaagaacagactgcaaatcagctcctagttgaggctagccaaacagcaggtgcctggggatgactcagtatccccatcatttgaaattttcctggtttaggtgaaaatactgggagttctgactcatcctactacatctcttgggagactgtgggctcaggagattcaacacaaagacatctgcccttgtgggttcacaggaacagatagacaatcaagaatgaaaataacaactaaaattaggagatggtaaaccctatggaaaaaagaaatgtaggtggcagatgggatggcactttaaaaattcctactccttatgactttcacaagtgaggctctgtggttcctaatctcttctcattgcctccgtattatgcactgaacaggataacagtccacccagagaatacacattctccactggaacatctcatttatgtgcaaattgctctaaagctggttcccctgatatataactattttgaacacaggggcttgtggcttacttaaaaccacagcttccatttggtgatagcatctttatactatcatctttaaagataatgaaaaacgactgaatatgcctttgagaattaatgtacatatgtaaaagagcagctcattaagcaatcccatacgacttcagtggtttgcatgctgtactactttgcctagacattgattttaagaagcttatgtatatcttcctgagtcaaacgaaggttcagtcatccttgactctacccttcaggcaggttatgatgtcagcaatccttaggtttacattcttacagccaaaaggatggtaattccttccactataccagttattttgctacgtagtgacaaaatgattccctaaataaactgtaagcagtgctgaatgatagccactcagctaatcaaagccacatttttcattttacaaatatgttccacctttaattgggaaagcaagccaaaaggagaccccctagttatcacaacatcccaccatacttaatgatcccaccctggtgttctctgtatcctggaattctcagaagttatacaactctcataggccaaaaacaaaagagcttcatttcacagccatctggaggtgccttcatgacactcaattacggctgcagactcagatgacttatctacaccccaaagggtctgcctctgctgctggaaatgctagacccagaagcccttggcactaatttggaccacacaatggactacggggaaaactacctgcctaatagggcatcgtgagcaaatgagaaaacaactgtagatgtttcgttgaaaagcctgggccgggcgcagtggctcacgcctgtaatcccaacactctgggaggccgaggcgggcggatcacgaggtcaggagatcgagaccatcttggctaacatggtgaaaccccgtctgtactaaaaatacaaaaaattagctgggcgtggtggcgggcacctgtagtcccagctactgaggaggctgaggcaggagaatggtataaacctgggaggcggagcttgcagtgagctgagatggtgccactgcactccagcctaggtgacagatcaagactccgtctcaaaaaaaaaaaaaaaaaaaaaaaaaaaaaaaaaaaaaagaaagaaagaaagaaaagaaaagcctgaaacatccccaaaccaaaagtctagttttaggtctcacaatttcggatgtgaaaggattgcagcaacagaaggagggtaactctgctcacactgctggtagttaatgtcctactctcttaactcctcttggagttaagtgcccctgaaagggtgcttcctgccagaccacaccaagtgcacacctgggtgtctccacaacagccgactactgtcgatgctaaaagttcaaggaggccaatggcagcaccactcaaaacagtgacatccaggctgaaagaaaaaaataaataaataagctcatctttaactcagaaaaagattagctgaacctcaggtgccaatataaaaaccgaagctaaaaaacaagcctgaaaccatacagtttcgcttgttaaagacactagagtggttgttttaagggctcctggctacctgagcccaaaccagaagtcctaggagggtggcactgggtagacccagcagggtggcaccgggtaaggccactggcaggcttatctcagttcccaggacaccagatcataagcagaccattaaaaggagagtagcagttaaaggtacaagacaggaagcaacagctggcaactcgatagcaggaaagcagacagctatgtcctcttgccaaaagaaaaatcagccaaaaatttaaccgccatggcagagtgtaagagctttagccgactcgtgcaggcaccactcgttagtctctagtggatatgactgatagtaaggtgtccccaagctagcgacccggaaggggtaaagcacacctatattttaaatgtttattgtaaaatacacagaacctaaaatccgccattttaaccatttttaggtgtacaattcagtggctttaagtacatttacactgttgtgctaccatcatcattatcctcctctggaacttttgcatcattccaaaaagaaactctacccactcaacagtaactccttaatcctcctgctcgtggtaaccactattttttgtgtatgtatttgaccatttttggtatctcatgtaagttgaatcacaatatttgcccttttgtgtctgacttctttctcttagcataatgtcttaagattcatccaagttgtagcatgtgatattgtgaaatacatatttggtcttcaccgtttcctggcatacgattccctggaatccccaaaacgctaagtgtctttttgtaggctaatgagtagactgagggctgggggctcctggatagcacaatcaggaacaattaagaaatggagcaccatgctaggacataccatgagtctgagttttcgcaaatgtaatgattttctcatactctgaaactaaacatttctgtgttgagcaaaacataaacgccaaggcgaaatgttcttgttcccttgcatttctgcagctgtaactgataaaggtctggacgtgcagttcacagcagaggagagagactgtggctgctctggacacatctggacgacaggcacccagccctcaagatgctgtctgccagctaggtggaaacacctcatgtgaatgggcccatttgcttcctctccactccaaaaggggatgagaagaggaatgttggtatgtgatttttgcagcaagcactgaactcaagcgaagcttggttatcttgccacctggaaggttaggtgtgggaggatgacactaaaagaactggcccagaaatccagggctaattttgttcccctttcccactgtttttgcagaaatctcaatataccacaggcagccaacagctcaggagaggatcgtgctccaaatgttcatcgagccaatcattgggacttctctgccaggttcccagggaagaatgttgtaaatgatggctgggtgccatggctaatccaaaatgaacagaatcgctatctcctcagagcctgggtccctagggcctggccaacatccaaggtgcctgggacacagacagccagtgaggggcatctggagccctgtgcagtgaagtagcaggcagtcaaggatattgaaaggtgtgcaggctgtcccagaccccacgcccagaaggccattcagagaccaaagaacatgactaactccaaaatgaagataaaaactacagttcagctatgaatgttttccgtctaaacactcaacaccatactactactttgtgctgtttacaatttcctagcctgctattaaataaaaggttccataaaagggggcaacagcccagaaaacaaaccatattgttgaagttgaacctctgcccatcccagaaaaccagcttgctggagaaacctgtgccatgtcccactgcagcctgggggtgccacggtgtgtgtctggtgtctatgcatactgtatccctagcacctcatggcactgggcatctaacaagagcccagggactagagacaggttcccgcatctctctcacggatgcacttgctgttgctagctcatgtggcctcctgaccctcgatttcttctatcaatacactaggctttctctgccgggaataccttgttctccaagacactccatctggctaaaatctttccttcaaaaggctttccgtgtgtcctccatttttgctaatttcaagcctgccttgggtggctttcccaactgttgctgtggccagaatttgccttatcacaatcacagggtatctacttaatgctgagaaactagatgctttccccctgcatctggaacaagacaagcatattcttactactctttttcaatcatacttcaagtccgaactaatgtaataagacaagaaaaggaaatgagagaggcacagattgggaaggaagaaataaaactgcctttgtgggggctgcgtgcggtggctcacgcctgtaatcgcagcactttgggaggccgaggcaggtggatcacctgaggtcaggagttcaagaccagcctggccaacatagtgaaactctgtctctactaaaaatacaaaaattagccaggcatagtggcacacgcctgtaatcccagctattcggaagactgaggcaggagaactgcttgaacccggcaagtggaggttgcagtgagctgagattgtgccactgcactccagcctgggcaacaaaggcgaaactcagtctccaaaaaaaactgtctttgttcacagatatgattgtttaggtaaagaattccggccaggcacatcacaaggccaggagatcaagaccatcctggccaacatggtgatatcccgtctctactaaaaatacaaaaattagctgggggtggtggcgcacgcctgtagtcccagctactcaggaggctgaggcaggagaatcgcttgaacccgggagagagaggttgcagtgagccaagatcgtgccactgcactccagcccggcgacagagcgagactccatctcaaaataaaaaaaaaaagaatcccgaagactcctggataagaagcaaggctgcgagatacacaaacatcaactgcttctttatataccagtaatgcacaattacaagcaaccacagcatctaccacactgtaatgctgtggccgcatttgttccccttcttccaagtgcatattggcatggatagtatctagtgagtgcttcgcaggttgacaggcctcaatgtgtgtttgaagaaagccagagattagccacgatggtcagccacacaaggcccaaagcctgaggcagaggctagcacatgatgtccgcagaccagccagtgtgtctttagagagcagtggcgcggagagtaaactatggccgctgaagtggacagggagccaaaaggatctggatgtgaggcagcatcccaaagtgcagtctcctgaccgtccagccacactgagattctgaagcaccactccgtccagcggcagagctttaagttggaaaatccaggggcataaagggagacaaatcaacttactctaaatcctctgaaaattcccttaacaaaggagttgtgttgacagagacttctctaatctgaagagcaactgtttctccctggttctctaggcatataaccctttctgcccacctctcatggagagtaggctctgacggcagaagccccccccaccaacagccaccacatgaaacaaacagatacttcaaagccagaagatctttgttcagatcctgcccctgggcaggcacctcagccccaggtccatcttctaggtggatttcgtaacatctaccttgtatctgtgaggagtaaacaaaagatacataaaagcagccagcatagcttctaacagatagacgtttaaaagttccttcccctttgacacacaaagtcacaggatgtgatacagcagtagccctcagttacattagccctcagctacattcttaacaaaagacacaacatagcatggcagccaggcctggcatggtctccagttgtgccctcccgttgaccaggctgcacagactgcagagccttccaagctgctccttctgcagtcctaaatctacttgagagccgctgctaagaaaacatcagatggactatactgctgctccctaccttcctgaataaacaacgtacacacgatacagagaagcactgagccactgccaccgaacccccccaaaccctggcttcacagagttttaaaatcgccttggggtactgcggttgcttttcaagtcttttacccatcaaagcctgacgcacttccacacattcctttgtagtgtttactggacaagtgcaaagaactaagatacgctctgtatttacagagctaatgggcctctttcacagcaagttgacatctcatctgcttttggacatgcctttgctcagggatcaggtttagtgggagatgccccacctgctggcaaatggaatacagctgtggactctaaccaggcgtcctcacttcctctgtatgaagccagccttcgtcacagcagatgatgtaagaggcagaaaccagctggaaaattgcaggtgaaatggtaatggcagcatataaggaccatgcccaggaaacccaagggaccaggtgcagcacggtgaaagagtgctgcctacatgtgtgcccatccacaacctcaagcatttctgcaatcctgcctgcaagatgaaagaaaaggaagcattacaggagattctattacaaccagtggaatctgcagttgggagagccactatgaggcacaagatgatggcctgcctcacaagggttacagcagcacccaacaatcctgagaaaagatccctctgtgcctgcctctgcaggcccaatgactcatagccaaatttggactttattataagcaacagtttattaaggtgggctctgcaaaaggcacaaacacgggtggaggtccacaaacaaaaacacttagcgtaagcactgatggaatatttggcctgtttttgccttgaatcttagctaagtatgtacaggactgtagttaactcaacggctttcaagaaaaatgcaaaatgctttctttgcattcttaatataaaagcttgtggttggccgggcacggtggctcacgcctgtaatcccagcactttgggaggctgaggcgggcagatcacgagctcaggagatcaagaccagcctgcccagtatctattaaaaatacaaaaattagcccggcacggtggcaggcgcctgtagtcccagctattcaggaggctgaagcagaagaatcacttgaacccggggggcagcggttgcagtgagcagagattgcatcactgcactccagcctgggcaacagggcgagactccaactcaaaaaaaaaaaaaaaaaaaaaaaaaaaaaaaaaaaaaaaagcttgtggtcacatcccttctctcctcaccccaccctgaaaaagagatgaaagaaattctatacagcttccctaacactttgaactaagccaaaattataacaatctacttcccacaaccagaaaatcagcttaacagaaagaatgcccaatcattcaaatatcaatccgactccgcctaagacccaaagaaagaaaacaggtctcacactaagacatccccaagcagcccaggataatttcctaggattctggcatttgggtaactgctggcacatcgtgtcacctttacaggtcacaccccaggtgtagcaacaaccctcttctgccggcacagagcccttccccagtcatggtggcaccacaaacacttgcagtaagtgggcacatggggagcaaacatgctcagctatcatggctgcccaccggggtggctaggtatcccccattttgtagaaataggcagtgtcttccatctgggaaagaagaggggctcttgtcagtcctgtctattcctgatccacgtgtctgtcttaagggagaaggccccatcactctatgagaagtgaccatcacatagagaatgaacagaatgacccctgccattttaaaaagaattccccaagactaatggttgctggagagttctgtaactttcacagaaactcacacaattcctttctcatgatatatgtgctcatatacccatcaaagtcttttacccatcaaagcctgacacacttccacacattccgcacacagattgctatgctatgcccacagcaaagtaatcaactcaagagtcccttggtggtggtggtgggtagggggtgaatgaagaagacaggtaaggcctgggacatccccgccatggccaagcccagctaagaagctggtcgacacaattttcgattttgtgatccccagcttcaagcataactctcaatatggacacatgtagagacacacacagaacagggacacatttacagggacatgtttccatggttccttcagtggcccagcatgagtggattccttggtatgacgttctgtttccttttccctaaggcaagtctgcattaaccagctggcttcactcaggagagtggggctcaacattccagtgctatgtgtccttacggcaagtggccacccacttctgcacttcacccacccaggcctgttaaggttcacgaggaaaacacgacttaattgctgctccacagaactgctgttctacagagagcgtatgaagagctgcctctccatctacaaagagaatcccttggagtttgcacctggccaggcacagtgattcatgcctgcaatcccagcactttgggaggctgaggtgagaggatcacttgagcccaggagctggagaccaactggacaacatagtgaaactccacctctactaaaaaattttaaaattagctgagtgtggtggtgtgtgcctgtagttccagctactctggtggctgaggagggaggaccgcttgaacccgggaggcagaggctgcagtgagacgtcacagccactgcaactgctgcctgggcgacagagcaagaccctgatccgataaataaataaaaacaaataaaaacctatgtgtcggctgggtgtggtggctcacccctgtaatcccagcactttagcaggccaatcacttgaggtcaggagttcaagaccagcctggccaacatggtgaaaccctgtctccactaaaaaaaaaaatacaaaaagccaggtgtggcggtgggtgcctgtaatcccagctacttgggaggctgaggtggaagaatcactttaatctgggaagcagaggttgcagtgagcagagatcgtgccactgcactccagcctgggtgatagtgggagactccatcttaacaaaaacaaaaacaaaaaatcaaacaaaaccatgtgtggggtagggcaatcacccgtaagacaaaataaaaagataaatatataccaaaaaaaaaaagaaagaaaatgcacctgggaagatgctccccgtcactagtcatgaagaaatacaaatcacagccacactgataccactgcaagactatgtgaatccactgcttcccacccctaaaaccctgacaataccaagtgctagtgaagatgagcaacgactaaaactctcatccactgctgatgagggcgaaaaatgatgcaaccctccagaaacatctgagagtttcctgtaaagctaaacatgtatttattccaatgacccagccatctcacttgcaggtctttaaccaaaagaaagaaaaacatgttcacacaaagaactgcatgtgaatagctttagcagcttcattaagaatcaccaaaaactagaaaccatccacgtgtccttcaactgagaaatgcagaaaaagctggggtctatccatatgatgaaacactactcagcaatgaaaagaaacaactgaaacactcccactaagtagtcagatgactctaataaactatgttaacgaaaagaagcctgactcaacctctacctcccctgcattgtatgatgccattttccatttaatatgacattctagaaaaagcaaaatcatagacacagaaaacagatcaatcgttgctgaggagccggacacggtggctcacgcctgtaatcccagcactttgggaggccaaggcgggcaaatcacgacgtcaggagttcaagaccagcctgaccaacatggtgaaaccccgcctctactaaaaatacaaaaattagtcgggcatggtggtgcgcacctgtaatcccaggtactcaggaggctgaagcaggagaatcacttgaacccgagaggcagaggttgcagtgagccgagatcgcaccacactgcactccagcctgggcgacagagcaagactacgtctcaaaacaaaaaaaaaaaaggctgggtgcagtgactcacgcctgtaatcccagcactttgggaagccgaggtggacagatcacgaggtcaggagatcgagaccatcctggctaacacagtgaaacctcatctctactaaaaatacaaaaaattggccaggcatggtggtgggcgcctgtagtcccagctactcaggaggctgaggcaggagaatggtgtgaacctgggaggcagaggttgcagtaagccgaagactgtgccactgcactccagcctgggcgacagagcgagactccgtctcaaagaaaaaaaaaaaaaaaaaaaaaaaagttgctgagtctcacgcctatggtcccagcacattaggaggatgaggcaggagtatcatttgaggtcaggagtttgagaccagcctggccaacatggtaaaactccatctgcactaaaaatacaaaaatcagctggacatggtggcgcaggcctgtaattccagctacttgagaggttgagactccagaattgcttgaacccagcaggcagaggttgcagtgagccaagattacgccactgccctccagtctgggagacagagtgggacttcatctcaaaaaaaaaaaaggggaattttattgcatataaacttaagagaataaacaaaccacatgcagtacaccaccctgaccccctttagacctggtacagagaccccccaggactgggagatgctgctttgcagggaaggcagacagacctgcaagtgcagcaggcaaggacagcctggtctgaaccacgagcttccatgctaacctgggggactctgagtaacagatgttctcagccttgtgtttcctgtctgtaaaacagagcagttcggccacgcacggtggctcacgaggtcaacagatcaaggccagcctggccaacatggcaaaaccctgtctctactaaaaatgcaaaaattagccaggcatcgtggcacatgcctgtaattccagcaactcaggaggctgaggcaggagaattgcttgagcccaggaggcggaagttgcagtgagctgagatcgtgccactgcactccagcctggacaactgagcaagactccgactcaaaaaaaaaaaaaaaaaaaaaaaaaaggattaaaaaattaaaaagtgcttttctgggccgggcgcagtggttcacgcctgtaatctcagcactttgggaggccgaggcgggcgcatcacgaggttaggagatcgagaccatcctggctaaaacagtgaaaccccgtctctactaaaaaatacaaaaaaaattagccaggcgtggtggcggtcacctgtagtcccagctacttgagaggccgaggcaggagaatggcgtgaacccgggaggcggagcttgcagtgagccgagatcgcgccactgcactccagcctgggccacagagcgagactccgtcgcaaaaaaaaaaaaaaaaaaagtgcttttctgaaaggagggctctagttaaggtaaaccatggttctgtgacttgtgctttacactgagagaacaaagcagcaagaccaacaatcttaaaggagtaatacacagtccatgtagggtacactacccctgcattcacatcaactggagaagagaagctatttccagctcaaagtaggggaaagttaatacatagctattcaagagtgtttatgtacagacagttaatcttgagaaatccaaattgtgtggctagaacaaagctactgtttacaatatttttcatactaatgcttcctggaggaccttccttggccccatgtttaaattttgattaaatgtcaaactagtaaaactatttgcctatgcggggatggggcggggggagaagacggttaggcaacacagtgccaaattcaaaactccgtactagctctgacagcgaacacctttagattcagaggagaaaagtagccttaaacaggacaattcagcctatctactgagatcatcttatcaaaaggagtaactgtcattacaataaaatgcaatacaacaatacaataaaatgcaacaaagccacgaagaaggaaaaaggctgcccagcattctagcacctatttgcacaattagcccacagagttacttacaaacaatattccccttatatagtctgtgttctgtttttgatggggcactgaatacagaacctatctgccaactttaactgtaatgcgataaccagagctcacacaaccacttctcgactgtttctgtcaggatgtttccagttttttaagtatcaacattacagggttgagaaggaccaacaagcatttgatggctaatgatgacaaagtccttgatcaagatgccagcaagaacattcaccacaacagactccatgcagaatgcttggagtgatgccctctgagccccaaagcacttgctctcacatttgaccaccaaggtaggatgaaagagctcagggtacaaagaaatatccactcatccgtcacagtgaaggattaccttcattatgtcctctccagaggtaaacccaaagtccctctgatcgctaacttttttacacttaccacataatcccaacccactctattcttccgcaagtcattcagagaaggcatacggtggtgacataaatgctgacgactaccaggtcccccggatctccagccgtctgtttgtttgcccacaggaacacacagtgtgtgctggcaataactaaacaagcttttctgcccaaggaggctgagctcactcagtgcctcgaggctccccaccatagttacaagtgctggcctaaccaagctgtgcctggaatcagccttgtcactgtgccgggggagtaggaaacagttaaaacacatttttatgctttcatttctataataaatgcatcagatatcacatgaaatcagctctaggactgactgagcacctgcctgctatacattttccaggccgccagtgccctgccaggggatgtgctgagcagccaaacccagcctggccatgatgcttgtagtaagctggcagacaatgtacgagcaacaactttcccagttaagcgccaactttccctgagtgtccacatgcttagggaagaaggttggacttaaaccaacaagcaattactgaatgcttactgagacatggggctcaatgtgtctgtatgctgtattccgacctcacaagaacctcgcacagggcagggattagggtctcagttttgcagccaaggaagctgatgcgagaagaaatcggtaattcatctaaggtcacacctgactcctcaccttatacccccaaaaaatcatttcctgatggatcaagggcatgaattggaagggcaaaaccttacaacttccagaagaaaatataaaatatatttcacttcaggatagtgttcttcccaccaaccgtaaaacaaagattcataaattcacctacattaaaattaagaccatcttttttttttttttttttttgagacggagttgttgcccaggctggagtgcaatggcgcgatctcagcacaccacaacctccacctcctgggttcaagcgattctcccgcctcagcctcccgagtagctgggatttctcccacctcagcctcccaagtagccaggcaggagccaccacgcctggctaattttgtatttttagtagggacagggtttctccatgttagtcaggctggtctcaaactcctgacctcaggtgatccacctgccttggctacccaagtgctgggattacaggcatgagccacagcacccagcctgaaatgttatttcttaataataagacttgaaaggtgaaactgatccatgggctgctgtatggatgttttagcaggcacgaaaacattcacctccttgtgcatgtccatcagaggtcttgggtgacaaggtgcatcaccaatgagttgtaatattttgaaaaatattttttctaagcagtaggtctcaacagcgggcttaaaatattctgcaaatgatgctgtaaacagatgtgctgtcacccagactttgtttttccctttacagagcacaggcagagtagatttagcataatttagatttaccataattcttaaggtccttggatattcagaatggctaatgagcagtagcttcaacttaaagtcatcagctacagtagcccctaatgagaggcagcctgtcctttgaagccaagtattgatttttctacagctataaaagcctagatggcattttcttccaataaactattttgtctacactaaaatgtttactgtagccacctttatcaattatcttagctagatctggataacttgctacagtttttccatcagcacttgctgcttcaccttgcacttttatgttttggagatggcttctttccttaaacctcatgaaccaacctctgctggcttcaaacttttcttctgcagctttctcacctctttcagcctccaaagaattgaatagagttactacggccttgctagattaggctttggcttaagggaatattgcagctgacctgatctatccagaccactacaactttctccatgtcagcaataaggttgtttcactttcttatcactcaggcattcactggagtcacacttttaatttccttcgagaactcctttgcattcacaatctggctaactctctggcttaagcagcctagcttttggctttcaaaatatgttattggccttttagcgttgttaaagggtattgctctgtcatccaggctggagtgcagtggcatgatcacagctcgctgcagcctcaacctcctaggctcaagcaatcctcccatctcagcctcccaagtagctgggaccacaggcgtgtgccaccatgcctggctactttttccattttttttatgaagacgaggcctcactatgttgcccaggctggtctcaaactcttgtcctcaagcgatcctcccacctacgcctgccaaaaaatgctaggattacaggcatgaaccccacgcctggccatttttagcttctgacttggtgtgagagacgcgagacccttcctttcatctgaacactttaaaggctattatagggttattaaccggcctaattttaagacagttgtgtctcaaggaatagagaggtctgaggagaggaaaagagatgggaaatagtcagtagctggagcagtcagaacacaaacatttatagactgaattcaccttcttagatggacatggtttgtggttccccaaaactatgataatgacacccaaaatcactgatcacgaatcataacagatataatagtctgaaacgttggtcacattaccaaaatgtgacacagagatgaagtgagcacacgctgttggaaaaatggcactgataaaagacttgctcaatgcagggtcaccacaaattctcaatttgtaaataaaaaaaccgcaattatctgcaaagcacaataaaacgaggtatacctatacatgcaacaaacacaaaaccggtaaactcaaaattcaggatgggcaaggaaatgaagtagggaaaggaacacacacaggaagcagaggtgactgaactggtcaggccaagtctcctcaagttgagtgacacaaatcagaatcactcaaaattgaaaggctaaccaaaacactgcaccgtcaatcacctacagcaccttcagtgaagtaagagcgctgcagggtgggtaggagcaattccctctgctgtgcttgaccctcatcagtaacaagcagagctaactctgacaggtggatggagtgcttctgctacccaatctcactgacagggaaacaggatcaaagattaagcaacctgctccagatcactgccaatgtctccaaattccagtgggtgaatgtccattttgagcttcagtaccactagtcacagtggtactcatctgtgcacctgcttaggtagtatattccattttcagcaagttctaattgcccatataaaacacatcagaggtacagagatctttaagcacaaaatgcaacactgagtctatctcatgccctttccaggacaagacaatgccaaaaaggaaaaaagcctgggcgcggaagtgagcacctatagtcccaactacttgagaggctgaggagggaagaggatgtcctgagcccaggagttctgggctatattgcatggtgccaatcaggtggccgcactacgtttggcatcagtgtggtgacctccaaggagtgggtactaccagattgcctaagaaggggtgaaccagcccaggtcggccagatgtggtggctcacacttgtaatcccagcattttgggaggccctggcgggcggatcgcttgaggccgggagttcgagaccagcctggccaacaaggcaaaaccccaactatattaaaatacaaacattaactgggcatggtggcgggcatctgtaatctcagctactcaggaggctgtggcacaagaactgcttgaacccgggaaacaggctgcagtgagccaagactgtgccactgcactccagcctgcacaaaagagtgagtgagactccgtctcaaaaaaaaaaaaaaaaaaaaagttgcggggccgggggggggggggggggtgggtcgcgtagtgaagaaaaaaaagaaagggggcaagtcaaaactcccatacctatcagcagtggggtcatgcatgtgactcaccactgtactccagcctgggcaacacagtggagacctcgtctcttaaaacggtaggttggctgggcgcggtggctcacccctgtaatcccagcactttgggaggcccaggcgggtgaattacgatgtcaggagttcgagagcagactggccaatgtggtgaaaccctgtctctactaaaaatacaaaaattagctgggtgtggtggcgtgcacctgtagtcccagctactcaggaggctgaggcagaacaatcgcttgaacccaggaagcggacgttgcagtgagccaagattgcgccactgcactcccgcctgggcaacagagcgagagtctacctaaaaaaaaaaaaaagtaatagtataagctgtgacactggatgaagaaagtggcaaaaataaaaatttgtaagaaaaaaattgaggacataaatttttaaaaagggggcaaaaaacataagctgaaactccttaaactttaaacatctgggctgggcgcggtggctcaaacttgtaataccagcactttgggaggccgaggcgggaggatcacgaggtcaggagtttgaaaccagcctgcccagcatggtgaaaccccgtctctactaaaaatacaaaaaattagccgggcatggtggcacacgactgtagccccagctacttgggagcctgaggcaggagaattgcttcaacccagcaggtgaaggttgcagtgagccaagattgcaccactgcactccagcctgggagacagagcaagactccatctcaacaaacaaacaaacaaacaaacaaaaataaaaactttagggccgggtgcggtggctcacacctgtaatcccagcactttgggaggctgaggcgagcagatcacaaggtcagatcaagaccatcctggctaacacggcgaaaccccatctctactaaaaatacaaaaaattagccaggcgtggtggtgggcgcctgtaatcccagctactcgggaggctgaggcaggagaatggcatgaacccaggaggtggagcttgcagtgagcagagcagagattgtgccactgtactccagcctgggcgacagagcaagactccacctccaaaaaaaaaaaaaaaaaaccaacaaactgtcaatctctggtaggtttaaaaggaatctttgctatcatctaaaagacaaacaacaattgtcggcaaagatgtggagaaactggaaccctcatatgtccagcaatgtaaaatggggcagccactgtaaaacagtctggcagttcctccaaaaggttaaaacataaataatgaatgtcccagaaattcctcccctacgcatatgccaagagaaagggaaacatttctacataaaaagtgtgtgtgggcactcacagaggtattattcataagagccaaaaactagaaaccaaaatatccatgaactgatgaacggatagtgtcatttctaaggatacaaccagattttctgaaattgggggtaggggaggggaatcaaagatgtttccttctcaaggagcaaaccgggtagtgtggcaatcaattctgaggctccatgctgcccttccaaggactgaggtactgtacccaagaatcactgtgccggagtgaaggacaaagcaatcaagtcatccaggcacaagtcacagaacactgagtgcggagagaggcagagcttgccaatctggcttcaccgggggctcctctcacctgttctctgtctgctcaagagttggtaagcaccctcgcacttaaaacattccaaaacccaagcttttgtggttacattctgaggcaatgcatagagaaatgttaattctgtgagccttttcaaggtgacatcaagacagaaactacttgctgtggaaatcattgtacaaagtgggtaggagtgagaagcccactgataggatgagtcccctgggagctgatgaaagggtgagatccaatccatttttaaacagtccttttttttttttttttttgaaagagagtctcactttgttgaccaagctgaagtgcaatggcgtgatctcagctcactgcaacctccgcctcctgggtgactggaactataggagcatggcaccatgtccggctgatttttggattccccccccccccccccccccccgaaggagtctcactctgtggcccaggctggagtgcagtggcgcgatctaggctcactgcaagctccgcctcccgggttcacgccattctcctgcctcagcttcctcagtagctgggactacaggtgcccaccaccacgcctggctaatttcttctattttgagtcgagacaggacttcaccgtgttagccaggaggtctcaatctcctgacctcgtgatccgcccgcctcggcctcccaaagtactgggattacaggcgtgagccaccgcgcctggccaatttttatagtttttattagagacggggtttcaccatactggccaggctggtctcaaactcctgatctcaggtgatccacctgcctcggcctcccaaagtgctaggattacaggcatgagccaccgtgcctggccttaaacagtcctttaggcagtcctgaaagacacctggctgcaccactgtttgaaccatctcccgtacctttgtgcctactcttcaccgatgcccaatatccatccccaaaatcagtttccgtgtggaggcaggatatggggaatttaaagcccctcagcaggcttccgcacccacgttcttagttctaacatgtgttcaaaaagtaagcaagatggccaggagcaggggctcatgcctgtaatcccagcactttgggaggccgaggcaggtggatcccttgaggccaggagtttgagaccagcatggccaacatggcgaaaccctgtctgtattaaaaatacaaaaattagccaggcatggtggcaaggggcctgtagtcccagctacttgagaggctgaggcacgagaattgcttgagcacaggaggcggaggttgcggtgagtcgagatcgtgccactgcactccagcctgggcaacagagcgaaactctgtctcaaaaaaaaacaaaaaaacaaaaaacagtaggcaggtggatatttgcacactcatgttcactgctgtattattcacaacagccaagaggtggaagcaacccaactccatcaacaaaggagtggaattctgacatgctacaacacggatggacctggagaacaggttattatgcttagtgaagtaagccagtaacaaaattctaaatactgtctgaatcggccaggtgcagtggctcacgcctgtaatcccagtactttgggaggcagaggtgggtggatcacctgagatcaggagttcaagaccaacctggccaacatgatgaaaccctgtctctactaaaaatacattaaaaaaaaaaaaattagccaggcatggtggcgggtgcctgtaatcccagctacttgagaggctgaggcaggagaatcacttgaacccgggaggcagacattgcagtaagccaacatcgcgccattgcactccagcctgggcaacaagaatgaaactccatctcaaacaaacaaacgaaaaatactcaacaaacaaaaaatactgtctgattctacttatatgaataactatggtagtcaaactcatagaaacagaaagtagaagactggctgccacaggctgggagaaagaaggaaaaggaagttattcgaaggatacagtgtcagctttgcaagatgaaaactttctagtgatctgctgcacgacaatatgcatatagtttacactgtaaaatggttaggatgttgcattttatgttttgaaacacatgcgtgtgcatgtaggcaaatgggttcagccgacattcctcaatactaacatgggaaaatgccctcacagggctgggtcaaatgaaatgccacacaaagcaagtgttcaataaacacctactactaataaaagcaagcatcggccaggcacagtagcttgtagctcccatttgtaatccctgcagtttgagcggccaagacaggcacattgcttgaactcaggagttcaaggccagcctgggcaatgtggtgagaccccatctctactaaaagtacaaaaaaggggccaggtgcggtggctcacacctgtaatcccagcactctgggaggccgaggcgggcagatcacctgagatcaggagttcaagaccagcctggccatggtgaaaccccgtctctactaaaaatacaaaaaattagctgggcgtggtggtgtgcgcctgtaatcccagctactcaggaggctgaggcaggagaattgcttgaacgcgggaggcggaagttgcagtgagccgagatcgcaccattgcactccagcctgggcaacaggagtgaaaatccgtcaaatcaaacaacaaccaaaaacaggctgtgcacggtggctcacatctgcaatcctagaactttgggaggctgaggtaggtgaaccacctgaggtcaggagttctagaccagcctggccaacatggggaaaccccatctctactaaaaatacaaaattagccgggcgtgggggcgcgtgcctgtaattccagctaccccagaggctgaggcaagagaattgcttagaagccgggaggcagaagttgcagtgagcggaggtcatgtcattgcactccagcctgggtgacagagcgagactctcaaaacaaaacaaagatgtcaggcgtagctactcaggagactgaggtgagaggatagcttgagactggagggtggaggttgccatgagccaagactgtgccactgcactccagcttggatgagggagaccctgtcttcaaaaaaaaaagtgtgaattgtggccgggcacggtggctcacgcccgtaatcccaccactttgggaggctgaggcgggcggatcacgaggtcaggagatcgagaccatcctggctaacacggtgaaaccccgtctctctactcaaaatacaaaaaattagccgggcgtggtggcggacagctagagtcccagctacttgggaggccgaggcaggagaatggtgtgaatccggaaggcggagcttgccgtaagccaatatcgtgccacttcactccagcctgggcaacaaagcaagactccatctttaaaaaaaaaaaaaaaaaaaggccgagcggtggctcatgcctgtaatcccagcactttgggaggccgaggcgggtggatcatctgaggtcaggagttcaagactaagcctggctgacatggtgaaaccctgtctctactaaaaatacaaaaaaatttgccgggcgtggtggtgggtgcctgtaatcccagctgctcaggaggctgaggcaggagaattgcttgaacccggcaggcggaggttgcagtgagccgagattgcgcactgcactccagcctgggcaacaagagcaaaactccatctcaaaaaaagtgtgaatgtaatgatttagtaagaactgtttaatgtattaatatttatatttcataatctgtaatcatggagtaaaagccaagcaggctgcatcacttgccctgcagtctcctagcacatgaactaatgggcaggcaggagggtgtgcatcatccaccttgcttaccgctgacctccagcacccagacaatccctggcactcagcacaagtaactgctcaataaccagaaacatcaagtgcttgccggaaaaactccatgatgagggagagggaagattacacagaccaaatttaagaatctctgccttaggaactcaggggctatcctgcctgaaccatcgataggggatattttcaagtcacctcaaccactgcttgactcactccaggtggacccaccactggcaccttctagtaccacagctcagccttgagtatgtgcttgaactttcgttcgcacttcacattttccacacacaaatataatgtgccaaaatgagccagtcctgctcccaaaaccctgctcacaaaatggaggacgtgagggtgtggacgcatagaatgaatgaaatgaaagatgtcagacaaagcaaattccaaagagaagtgggaaattttctagcctccaagaacagaggacaaaactattaaacatgatacttatctaggtcactagagttcactctaggacacattgttttggaaagaaaagcccttcaccattccccagattaaagcaaattcactaatctgtgttcttactacacaggggcctggctttctcaagtctgggaccctgctgggactcttatttccgacgtcctattgggaggagccctcacatccatcctcctggagatgcccaatgcccccaagtctggtctagatccacccttgcattccaggcttgcacatccaaccgcttcaatgacagcatccatgaggatgtcgacaagctccacatggtcaaggaactaaagtgaccccattttctctaaaacctgtcaaaacagggtgacaacagccctactgagtgttccaagcccccttcaaaggcccacttaccacaggggacagtggctaccaggctggataacccagctgcagaacagtcccaacactgcagaaagtccccctggacagcactgctttggaaattgggtaatacactgtaaaataagtaaggtctagaccagaccttggaagatggaggaaatggagtttggggggatgtctggaagaagaatcaaatgaacggaatgaggcaacagtgtgtcacagaacccaggagcccagggtgctacatgacaggagtgtaggtcttatcctatatgcagtgcggtttcagggtagcataatcatgctgtagtcatctattctattttgattgtgtacttttcaactagcttactagtagcactgtgcgtggagtttaaccacttctaccattttctctggactggctttgttttttttttccccccacaggtattcagagccaatttcctactgaatgagatcacgtgtcattttacgaagtcaaagaaaagatgtaaaagtaaaatccttcagggcacacctgttaaatgaatcaccacctttctagcacaggggtattaggatcttgtgcaacaatcaccaccggagacattaggatccctgaaacacctgcctcactcactgtcatgtctgcagtgaatgcagaacagtgtctgattaccaagtacatccagcacacgcattggacatggatgttgaccgagttccacttggtgtgcctgaggcaggcaggaaattctcttggaaacagaatccttaaggggattgggggggggaagcacccatgagctagaactcaattctaccctacagtaagcagcacttcaagggccgggcatggtggctcacgcctgtaatcccagcatgttgggaggaccaggcacgtgaatcacttgagatcagaagttaaagaccagtctgaaaatatagtgaagcctcatctccactaaaaatacaaaaaaaccagccgggcgtggtggccggcgcctgtagtcccagctacttgggaggctgaggcatgagaatcacttgaacccgggaggtggaagctgcagtgagctgagatcacaccactgcactccagcctgggtgactctgtctcaaaaaaaagcacctcaagaccgagaagcggccgggcgccatggctcatgcctgtaatcctagcactttgggaggccgaggcgggcggatcacgaggtcaggagatcaagaccatcctggtctaactcgatgaaaccccatctctactaaaaatacaaaaaattagccgggcgtagtggcgggcgcctgtggtcccagctacttgggaggccgaggcagaagaatggcgtgaacccgggaggcagagcttgcagtgagccgagatcgcgccactgcactccagactgggcgacagagcgagacaccgtctcaaaaaaaaaaaaaaaaaaaaaaaaagactgagaagctcaccataatcctgaaagagtatccagttcacaccataattttaacaagcctggggcacctggactaaagacacactccagtttacttacttccccccaaccatcccgcttctatattcccagacttgctctgagtagcaaaaggataaatggaagtgaaggcccggagcggtggatcacctgagatcaggagttcgagaccagcctggccaacgtggtgaaaccctgtctctaataaaaatacaaaaaaacagtcgggcatggtggcgcatgcctgtaatcccagcaactcaggaggctgaggcaggagaatcacctgaacctgggagacggaggttgcagtgagctgagaccacaccattccattccagcctgggcaacaagagccaaactccatctcaaaaaaaaagaaaaagaaaaagaaaaaatagaagtgaaaccaaatcaaggcaacttggttctctagcggaaactttttgaagatgaggttaaattccactcttgtgaatgtcttcatgagaaactcctcaggagggaagcactgtttttactgaccagatgtctgggtgaaaaggagacctgtccagtcagcattctgcatccctcttctgatcatcccctcacactggtgagcacctccaagggacaggtacttgctttcagacctgtccaggtctctttccaaacctctgctgtcctcattgaagaaccagactcaatgctagcccccttcctatgctcccagttggaaggtctcctccctctcaggctgccttgcctggacatcttggaaagcacttctgagctctaccctgtgctcactacgtatcatccaaaccatctgagttcactgagaacaaagctgaatatggtggactcccacagcttatgccacagcagacaagagctagtgggctctggacacaagtgctccaagtacttaccaactctgtgaccctgcaaccctgcccaagtgacagctctccaagcaccaccttccgtatctgcaaaccgggatgatactagtgcccagtgtatatggttgttttctgaggacttaaggaatgcgtagaggcttagaaatattcgctaaaacagaacaatcagcagcagtgtgctcaagctcagggtctggggagggcaatgtggcagtgaagtgaccaagtctgcagctccctacagcatcatggttgacacagaaactggactgatggatgtctggctccaccactttaaaacaggcatgcagtaagcaatagaaaaaaattaaggaagatgtcaagcatccagtcagaaaatgtagttttatactttacagggaagcctattcataggcagctatttgctacaaaccctgaacttttcagagtcaacaaagataaggactgctttaaggtgaacaatgggagtggggggtggtgggcaaggggtggtggtggtggtggtggtggtcaggaaggtcaggggaaagagacacaggccagaaagggtaaaccagctctcacaagtgcaaaggacatcagttaccagagcagacaggcctaaagactgaggataagcaagctgcaggcagcatgctacgcaactcaaaagggcccaatagagagaccgctctaacactggtaatttaaaactgcattcctgggattacagatagctgagctattattttgaaaaagatgaacacgaaggtggtattatttccaggcagctaatctgtcagctgaatggtttcctactgtcaaaaggaaaacatatgaagagtctcatacacacacaactctattacttggcagctttttataactgaaagtgcttcagagccaagtaatttttaatgaagattacaaatgaaaacaacctacacacagatagcaccacctttcacagaactctttcacgcacatgatcttatttctcttaattacaaaatagaaaggggaaactgcttaagttacaaaaatcatgcctgtacagtaagactgcaattcaactgagcagagaaatgggattaataaaagccaagaccaatggtacatgaatgagggaaaacatccattggcacatacaagtttaatcttcaaactatagagattggggcgggggggtgaaggagtctgtaataggtgctattcttagaagtaataagagttcttttccatcctctgactcaactctgccccaattacagaagtatgaattattcaagtttatggtattatatttcctattccttccaccagacaaggatgtgaggagaaagagagtggcactgtgtacactgcttggtgtagcatgtcgatatccctaaacgtaagcatgtcatgctgaagaatggtagtttcccacaagctttcttcctcaatctgcaggttccagtgcatgcgtaagcaaatgtcccgcagcacagggcacacattaagccacgtaagggaccacagcataaatcttgtaagcctacccacatccaacactaccacataaataatgaggctggctaggaaccattcagttaccttctggagcaaaggctccataccaacagcaaatcatggagacagtttacaaacagcagcagcttcagtgtagagccctagttccaagaccctcatctgcggcctttgcaacagacccattctggtacattctcaaattccttatccccaggaaagagcacaggctgacaaagttgggggcacaggggccctgggaaggttcacatcactgttgacacgttacctgacaactctgtgaaacctctggaggatttttgcaaggacaaaccaaaatgggtgatccaccctgtttccaagtcataaagttgtaaatgtctagaaaagtaagatacatgtgaaaaccagcctggcacagtggctcacctgtgtaatcccagcagtctgggagacaaagaaggcaggaggcttgctcaagttcaggagttcaagaccagcctgggcaacatagtgtgacctcgtcccttcaaaaaataaaaaaaaggctgggagcggtgcctcacacctgtaatctcagaactctgggaggccaaggtgggcagatcacttgagcccaggagttgcagcctgggaaacatggtgaaaccccatctccacaaaaatacaaaaaattagctgggcatggtggctcacacctgtagtcccagctacctgggaggctgaagtaggaggatcacctaggccaggaggccgatgctacagtgaatgactgcactccagcctggatgacaaagtgagacctcgtaccaaaaaataaaaataagctaggcatggtgacacacacctgtagttgcagctactcagcaggctgaggtgggaggatcacttaaacctgggaggtcaaagctgcagtgagccaagatcatgccactgcactccagcctgggcaacagagcaagaccctgtcttaaaaaataaaaataaaaagtattcaaaaccatcaagaggcagggtgaagtggctccgcctgtaatcccagcactttaggaggcctaagcagatgaactgcttaagcccaggactccagaccagcctgcctaagcaacatggtgaaaccccgtctctacaaaaaaataccaaaattagatgagtgtggtggcccacacctgtagcccagttacttaggaagctgaggtgggaggattacctgagtttggggaggctgagactacagttagctgtgatcatgccactgcactacggcctgggcaacacagtgagactctacctccaaaacaaaacaaaacaaaaaagccatcaatagccctttaaccaacatcgtaataaatttttcttccacagagtaaaatcaggaaattcattctggtacctggtctttagagttcaatgtttatgcctatgtgcatttttgtggagagaggatccaaagcatctgtagcatactcaaggagacctccagcctcctcttaaggagtgatgatctagagagaagcagggtcagtcccattcttagccactagactcaattattttgtgtctcctaaaggaataatatttccaacagtgagaactgtaggaaaacgattattacagtagaacttaacacttgtttttgattatggaaatctgaggaggcttttcgtaatgcttgaggaatgccaagcagcagactacgagaacttgagtatggaaatagcttagcaaatagcaaaattacaactgtaccttttgcaggcacggaagatagatgaatccagtctcctgaactaacaatagttactagtaataacaatataccatacagattacataagttatataaataacaacttgttatttatatggaagagagacctaatgtgataaacacaatttcaatcttgtaagcatttatttaaactttatatctacctggtctcttatccaagattttcctgaacactttaagctggtctcactcctgtgctcccttcagggctgttttcccgccaaactggatcattcagcccacccaagtaactcctgagacttggcttgacttctcccagagctccttctatgcctgacacaggtaagatacacagtgtctttcatttcatcttctacgaaaatatttgggatacacacatccttaactatcttcattctaccctttgtgagtaactcaattctgaactgttttccactaattctggtttacaaactagtatggaaacctcctttcagccatccataatttcttgctccaagttcgggggtacattttacttttagtataggactctgggccaggcatagtggctcacgcctgtaatcccaacactttgggaggccaaggcggatggatcacctgaggtcaggagtttgagaccagcctggccaacggggtgaaaccctgcccctactaaaaatacaaaaactagccgggcatggtggcgcatgcctctaatcccagctactcgggaggctgaggcaggagaattgcttgacccaggaggcagtgagccgagatggtgccactgcactccagcctgggcgaaagagcgagactccatcaagaaagaatgggaaagggaaaggaaagaaaggaaagaaaacaaagaaaaaagaaaaagagaaagaaggaaggaaggaagggaaagagggaggggactctgtccattggacaaagcatcccatctagcatgcctcttatcaacaagcgagatgctgctggagctaccacttgggttgagggaatggagggcagagaccagctacaggcgccatgcttgaggcaagccagttaagcattcccattctgcacatggtcagagatgggcaatgatccaacctagaatccactgccatcagaaagcactactgggaagactcactcttgaccttgaggtcagaacattagtgataaagaacaagtactgaagtcattgtggagcccttagattcaactactcttgagcctcatgttgcatcaggcaacaaactcccttctgtttcagctaattttgtttatttataccagagaaagacataagtaatacaaccatttcctcacagtcatctgaataaagttaggagaataacatctgagaataatcgacaagtagcttaccacacatgcacacaaatgacactctacatacttcttgtttcacctgtggcaaactactagaccttcaccactccatgcttctccaacttccctcaccctaccccctacaaagcttctaaaacacagtgggtacagggaagaaacgaaactaaagatccatgctttcacctgctactagaaagcatatccaggacagtcatcattgggcaaatgacaaagaaacagatcacaaaatggcacatacatacacacacacacaaatcaaggtattcacaattgccatcaagtagcatggaaaccaatgtaattcaactcctctgacatgacccccccataagaaacacattttatcatgtacacaacacctaagatcaaagcaaaggttttatgaaatatccttgaaaattgtgacaccctctgacatttcccttttctcccctatacaccaattgcaatccaccatatttgtttcatgacccatggttttgttttgttttgttttgttttcttctgagatggagtctcgctctgtcgcccaggctggagtgcagtgacacgatctcggctcactgcaagctccgcctcccgggttcacgccattctcctccctcaagccatgccatgacccatggttttaaaaacacaaagaaagccaggcgcagtggctcacgcctgtaatcccagcactttgggaggccgaggcgggtggatcacgaggtcaggagatcgagagcatcctggctaacacggtgaaaccccgtctctactaaaacatacaaaaaaaaaaaaaattagccaggcgtggtggcgggcgcctgtagtcccagcactttgggaggccgaggcaggcagatcacgaggtcaggagatcaagaccatcctggttaacacagtgaaaccccatctctactaaaaaatacaaaaaaaaaaaaaaaaaaaattagccaggcatggtggcaggtgcctgtagtcccagctacttgggaggctgaagcaggagaatagcgtgaacctgggaggcagagcttgcagtgagctgagactgcgccactgcactctagcctgggagatagagagagactctgtctccaaaaaaaaaaaaaaaaagaaaagaaaagaaaaattagccgggtgtggtggtgggcgcctgtagtcccagctacttgggaggctgaggcaggagaatggcgtggacctgggaggtggagctttcagtgagctgaaatcataccactgcactccagcctgggtgacacagtgagactctgcctcaaacaaacaaacaaacaaaaatacaaagaattattttcttccaattaattgggaggctgaggcaggaggatcatttgaacccagaagttcaagtccagcctgagcaacacagcaagactccatctctttaaaaaaaaaaaaaaaaaaaaaaaaaagaactgctctctcttaaaatccagattctgatcaaatttctctggaatcaaaacctatgcgccctactttatatatgaaaaactgaggctagagtggttaggcaacgggtccaaggacacaggcagatgtcccctgctgagtgtgccccagcagcccagtatggcccagactggcatccaccactgggctggcaggttccacctccatgtagtttttttgtttcaactctcatgataatgatctgctcccacaaaatatgtttcctcaaacagcatggaaaattttcaagtatgaagtccccaaatttttctcaccctcttcccttttctttacacaaaacaaaactttgaaggctaatccacccatagacatgtatgtgttactgcctgagaaggaacaactgcagacattagcaacacacaaggacacgagaattactaattcacgtttctgaaaattgtgtaataccaagcccaacacctctcccctggtgctggctgacaatgtaccagtgtctcctgactaacagcagctaggaacaaataaagagtttcagccttgagtggagaccaagacaaggaaggtgaccacacatactaagtaggaagggcctggatagcatttctcacactttttcaggcagaaagcaaagccagcactcctcggcccccatctttctcaacagtcccaggcatctttatacaattagacatgaggcccaggtcagtacccacatggtcccccttttgtcactgtgcaggcacactgatcccattttacagaagagaaaactgaggcttatggagacgatgtaactcccctgaggtcaaggccagaagggggtggggctgggactgcacccaacagtgaactccatggtgttctctctcctctcctgctctggtacacggctccacccaagcccaaccaatgctgtctgccacagcccaaggtcccagaaacttcctacactgggcagaacaggctaacacatgcctggggaggggggaaggggaaggatcacacaactgtctacacctaggataaacgaaaaatagaacaaatgtcaaatttattcacattctcttaatttgaagctaatgcttagattatgtgaccaacctctaaagaaaatatatctttcaattgcatttcacacaagcaaaaggcaacctttgtggaaccggatcccaatgacgcctagtaagtaactggacttaactggttcttctggtcaaaaggcccaaagtcgatcggcagtatgccagactcccagtcaggacctccacacatccagctgccaaaattactctaccaaacttttccagggagaccttacaccttcctggggaccagaatcctttcaccaagcccagatgccaatacaatcagaatcagagccaatggaggccagaaaggtatggaaagatgttccagtgttctggaaaaactttggcccaccagtgccttctggctccctgaccaagtctttgtgttcagataaccaggttttcataagatgggtaagttacattttaggcttgaggatacactgagccagcttcccctgctggatcatttccccaaactctgcagcaaacatcccagggtggatgcccccaaagctgctgcacctccactaatcccattatcactgctcttaatctcattatcagataaaaacaaacacaatccctctttcaagcacctcttccactggtctccactcagagctcacttggaagacgtggcacctctggaaggcacctggtgggctgtagtgtcacccagtaccatgccctggatcagctggtgcacctcctggctgtcagcagctctactctgacccctggcttcctcttcccacttctattcttcaccttgggcaaggacggcagtagctaaccttgagagggcacagcactgctgccaagccctgtgctgtgtgtcctctaaggcactgtctcattttaacctcatctgaaagatgggccaatgaagctctgggaaggctgagtgacagaatgaatgttacacagcaggtagcagggccaggattctaaccgaggcctgaatgtgccgtactggtgttatcagtctttggagcaaggcagcaaaaatgagataggactggatgccaagaggctgcccaagccctccaaggtcaccctccctagagcattccagttaagactggactgggctcgtactgccgggtcaggagacttgatttcaggaaacaaagtccaactctgggcaggagagggtagaaaagtcaaagggcaagagcctagagacacttctacttctcaccacattaaaaaagacacattttgttttcatacatcatcatttgtgggggaaaaaatgtttaaaatctcacccctataaacaagaccctgtcaagctctgattggagaaatggaaatacatgcaacctttccagaaaataagttaaatcaagttttcaaaaatatacacctcccaattcaaagatgaaaaaagagaaaacaccagatgaagtggctcacacctataatcccaccactttgggaggctgaggcgggcggatcacctgaggtcgggagttccagaccagcctgaccaacatggagaaaccccgtctctactagaaatacaaaattagctgggcgtggtggtgcatgcctgtaatcctagctactaaggaggctgaggcaggagaatcacttgaacccgggaggcagaggctgcagttagctgagatcgtgccattgcactccagcctgggcaacagagcaagactccgtctcaaaaaaaaaaaaaaaaaaaaagaaagaaagaaaaagaaaacttggaaatcatgtccaaatgtccaaaaatagcagaattaagttatggtacattcatacgacagctaagcagccagttaaaacgaaacattttggaaatgttcacaatgtagcattaaaaaaaaaaaaaaaaaaaaaggccgggcgctgtggctcatgcctgtaatcctaatcccagcactttgggacgccgaggtaggcagatcacttgaggcgagaggttcaagaccagtggggacaacatggcaaaatcccatctctattaaaactacaagaaattatccaggtgtggcagcatggggcgcctgtagtcccagctacttgggaggctgaggcacaagaatggcttgaaccggggaggcagaggttgcaatgagccagtctctgcatgggtgacagagcaaagacttcagcataggtgacagagcaaaactctgcctcaaaataaataaataaataaaaattaaaattaaaaacaaagaacttcactacaaccaaattgtgttactcagacaaagacaaataactggaaggaaagaaaatgggattaagagatcatttttaaccatcattttaacattctactttttccaaattccttaaaatgaccatgcactacttttgtttaaagaaaaagccttacaatctccttttcaaatgatgtggaacaaccaatgttattcctcttcaggacgaggacaagaatgggacagacggctgctctgccctcaccctgactcagaactctcttcctctgcttcttcagagtggactacattccatgaattatgctaggacatgtgcacgtggtttaattgaggttggtagcctgtcgagactgaaaacaaactgctttaaaacatcaccctttacaataaaggaactgcaagtttggggtgcatctccgagactgttctctatggagcagcatttcaaactgttctgtaaccatgcacaatgtaaaaaaccaaacggtgaccaaaccatgaaggcagaatacaacatgtcaacatgctgatatccttgcagttccacttcctcattcatttaaacagttactcagtatcccactaagcttttaaccattctacctaagtactagaaacatcaatgccattaaaaagtcgctgtgcaccctcaaaaacttaaacatagatatatgacccagcaattccactcccagatatctgtcccagagaaactaaaacctgtacgcaaaaggccaggcgcggtggctcacgcctgtaatcccagcactttggaaagctaaggtgggtggatcacttgagctccggagttcaagaccagccaggccaacatggtgaaaccccatctctactaaatagtaaacacaaaaattagccgggcatggtggcaggtgcctgtaatcccaattacttgggaggttgaagcaggagaagtgcttgaacccggggggtggaggctgcagtgggctgagatcgtgccactgcactccagcctgggcgacacagcaagactccgtctcgaaaaagaaaaaaagagaaaaaaaagtacacaaatgtatttttaacagtactattcacaattgccaaaaagtgaaaacaacccaaatgttcaccactaatgaatgggtaaacaaaatgtagcatagccatataatggagtatcattcagttataaaaaggaatgaagtactgattcatgctacacagcaagaaccttttggaaacagtacagtgagtgaaagatgccaggcacaaaaggttacatattgtaggattcctgaaatatccataacaggcagatccatagagacagagagtagatgagtggcttccaggggcaaaagtggcggggggtgggcaggagcatggggaatgataggtaatggatttcttttggggggggggggtggaaatgtcctaaaattggttgcagtgatggctgcaaatctctgtaaatacatttaaaaactgatgattgtatcatgtataacaacgtttatctcaaagctattattttcttaaaaagatgtttggtaggattttacaataatagtatgctcaaattatacataattgatattcaataaacgtggaggatgaacacgctaataataaagactacgcatattaaagtcattatacaaatatctttcagtctttccttgtacatagtaagggctcaaggactaattgtagagacagattggccaatcatgcacacataaaatcaaaatatttaaaaatgtgttcaatgtttaaaaaaaaacttaacaggtttttattgacaacatgagattcacattaagaaatgctacccatatgtgtttattgcccacttcatatccctcttgaaaatacttttggcaggtcagggttgaaccacagcgcaaagccactcaccgcacttcaaactgctaagtgggaaatgtccagtagtgcatggaaacacactgcatgccaggctgctcggactaataagtttactacaacaccgagggaccccagcgttatcttagttgaaactcacattccttgtaagtcactaccgaacaattatgtccacggctaacaacatttttaaagcgggattatttgcatttggcattacggcatgcaaaattcttgctcaattacttctcccgtttattcattgagactatttaaggtgctcttctaggcacaagatacaacagaataaaacaggcaaagccaagcaaacaaaaccctgccctcatccaacttacattctggttttgttttttgttttgggacggagtttcgctcttattgaccagactggagtgcaatggcatgaccttggctcaccgcaacctccgcctcccgggttcaagcgattctcctgcctcagcctcccgagtagctgggattacaggcatgcgccactatgcccggctaattttgtatttttaatagagacgtggtttctccatgtttgtcaggctggtgtcgaacttttgaccccaggtgatctgcccgcctcggcctctcaaagtgctgggatcacaggcgtgagccaccacgcccggcgcattctgctttttttttttttaagttaacaaggaaattttatctttccaaactcatctcttatgtattaaatgtcagcaccagcaaggaattccccacaattctcacctcgcaaatgtacactcttttctagacaccaaaaatcacaaagatttatgaaacattaggagctccaatgacaagcttatctttcctttttacagatttgccaggaacataaagacaaacatggtctactctacaagtttattcaaaatcagaaaccaaaacattttacattcacaaaatacaacacactatacagtaggttgtcagaagcagatttaacagcccagggtcttcaaatcactgaggtgccaaatggttttttgctttaaaaacaaaacaggccgggcgcagtggctcatgcctgtaaacccagtactttgggaggccgaggctggcggatcacgagatcaggagatcgagaccatactggccaatatgatgaaaccccgtctctactaaaaatacaaaaattagctgggcgtggcggcgcgtgcctgtaatcccagctactcgggaggctgaggcaggagactcgcttgaacccaggaggcagaggttgcagtgagccgagatcgcaccactgcactccagcctgtcgactgacttcagactctctcaaaaaaataaaaaataaaaacaaaacaaaattcaatctcttaaatctgtaaatctgaagtcattcaataacctgaattgtgaaacaagaaaatattgttacccccacctcctaaagcaaaagtgcaatttagtacaaagatcacaacaactggctcaaaaaggcaacttttagaaacaaagtctaaattcctttaaacaattcaataatttagtggaaatgttactaagtggccaatgattctcgttattcttagctaaaaattttccctcgctgtcctccagactagcgaagctaggcatatagcaccccagaacagccaaacaatccttaaaactcagcagctaccttcttatctttcatccgtaggcaaagttccttatcttcagcaattccactgggctgactgctagcaagatactcggaggtggactcgactccttccaattaagaccaactaaagccattctgagaccggctaactccagtttgagcctttaagatactatgtttcctaccaaagaaagaggtatggtggataacagagcagcaatacattttgtttcagattaggctttgccttctccatttgatcaatggaaaccctgagtggtttatctttccctggctgaagtttttggggggaagcgcttggttatctacaacgcatcagtgataagataaaaagataaaaaacataatccccacccaaattaaaccgaaataaatgctttatgaaattattggcggccgggaacggtggctcatgcctgtaatcccaacactttgggaagccgaggaggatggaacacctgaggtcaggagttcgagaccagcctggccaacatggtgaaacccgcgtctctcctaaaaatgcaaaaattagctagatgtggtggcgggcgcctgtagtcccagctactcgagaggctgagacaggagaatcgcttgaacccaggaggcagaggttgcagtgagccgagatcgcgccactgcactacagcctgggcgacagagcgagactccatctaaaagtatatgtatatattggcaagatcataaaacagattgtgccatcaaaaactttcttgaaattaaaaacacattcataaatccttttgagtatcgctttctttacaacttccaaagacggtagggaacttgacagctccattcacaaaaaactcccgaccattgttacagccccaaagagccactggcttacgaggtaaactgcgacttggtttttggaaccacggactggtagagccctgtcgaaggtaagcaaagacattccaattctcgtgaggcatacattccaaggggtcactagcatccaacacacacgcagagaaatgaacccaagaccagacaccccaccaggctgcacgaaacgtaaacaagtaaacaagcaaataaaaatcttaaaaaaacaaagcgtagtcttgagtaaaagggaggtcagccacccaggagaagcacatgactcatgcaccggcctgaactaaagtatttacaccgtccactacaacagagtggggtttcccatcttcaagcaaacccaagccttgggggcatctcagccgagtgaagccatgctatttccgtttgggaggagggggatcattttatttcgctgaatcacaactcccccacatccccaccccaaatcaccacaatcaccaccaccacacaacactgcaaataaaataggccgttgcaaggacgccggcgagcacggaccgagcaaaacaaagcgcccagcaaggggctgccaggctgagagtgggtgcgtcaagcgggccaagctcgcctccagggcaccgctcccgccctgaggcctggcctcagaccggcgtgcagccgcagccacctccctccgcaggggacctgcccctttctccgcagcactccggggaccgccgggaaggtgaagagatgggggtgggggcgcgctgccccggcccaggcaaaacgacctgggtgccagaaggagagcgcgccggccccggcccacgtgagcgccgcggccgagcccgcctagaggaccgcggaccgggacagctgcgctcgcggcccccgcgccaggccgggacttacccgggccgggcgcgccgcggaccccgcggcggccgcttcctcctcctcctcctcctcctcacttaacaaaatggcggcggcaggaagtgccgggcgcctcggcccgccccccgcccgcccccgaccgccggccccgccgcggcgcccgcgccccccacccgcgccccgccggccagcccaagcccgggtccgacggcaccaaaggcaggacagccgcgagcgaccccgccgccccgacaccaacggcgcaggccgccccggcccggaacgaacggcgcgggaggcccgcaggcccgagcccgcgtagccccggcctccccgcccccgcgccgcgcggatggcgtaggtggcggcgccccggccccattacgcaatgcaggttacgcggaccgcgccgcgagcctccgccagccgcccagtgtcgtccgccgccccaaagggcaccagtcctcacctgagacgctaggccgcacgccgcccccgccggccgtccgcccgctgccgccgccccctccccgagctgcctgcgcggcgccggggcccgcccgccgctctgccgagctcacaggccgcgctcgcccgcgggcaccgccggcagccgccgcagccgctgccgccgccactgcttcggctcctcggctgcgggagaccagaacaaacagcccagccgccgccgccgccgccgccgccgccgccagcgcactgacgtcaccgcgcacgctgcgcgcgcggccccgcgccgccgccgcccggtgtgcgcgccccgcccccgcgcccagcgcgaacgagctctggagagacagtggctgcgaggtgagtgggggataccgcggactgagggaggagaccccgcagagcgaaggagcgggctgggggaaacgggcggactgcaggctgggcctgcgggaaaagatctgaaggctgagagagacatccaaaatactaagaaaggtctgaagacagaccctcacagggagggaggatggtgaggagggaccccacagactgatggaggaggcggaggagagagccctaaggggggaccccaggtagggaggctgaggcgagagagctgcgatgggggcgccggggctggggtgaagtggaggaaaggaggtgagaggaggctgcgagcaaggccgaggcggatcctccttggctgcccctgggcagggaggtagcacctttctcctcttatgcccccctgttgatcttcttccaacccacctttttaaaaaaagggacatggtcttgctctgtcccccaggctggagtgcagtagtgcagtcatagctcactgcagcctcaacctgctggcctcaagcgatcctcctgcttcagcctcccaagtagctgggactacaggtgtgcaccaccacacccagctaactattttttgtagagatgggatctcacgatgttggccaggctggtctctgtctcctggactcaagcgatcctcctgcctcgacctcccaaagtgctagtattacaggcgtgagccaccgcgcccagctccttcccatccttaagactcaaccccaagtcagaccaggctcggtggctcacacctgtaatctcagcactttgggaggcagaggcaggaggttggcttgaggccaggggttggagaccatcctagccaacagagtgaaacctcgcctctactaaaaatacaaaaattagccccgtgtgggccgggcgcagtggctcacgcctgtaatcccagcactttgggaggcgggcagatcacgaggtaaggagatcgagaccatcctggctaagacggtgaaaccccgtctctactaaaaatacaaaaaattagccgggtgtggtggtgggcgcctgtagtcccagctactcgagagactgaggcaggagaatggcgtgaacccgggaggcggagcttgctgtgagcggagatcgcgcccctgcactccagcctgtgcgacagagcgagactccgtctcaaaaaaaaaaaaaaaaaattagccgggtgtggtggcgcatgcctgtaatcccatgcctgtaatgccagctactcaggaggctaaggcagaagaatcacttgaacccgggaggcgtaggttgcagtgagccgagattgtgccactgcactctagcctgggcgacagagcaaggctctgtctccaaaaaagaaaaagactcaaccctaagtcagctccaggacgtatgtgcctactctacatgtgtgagtccgaggggaaaaaacatcatatgacctcttctagggcttccaaagcaccccacctggccacggaagagcttagtaaacatggggtagttttgagattgctaaaaggaggaagttaggcatatgtctcttgtagcttaaaataatactgtgaaatttttcaaacctggaaacaaccacttctctttccttttatatatatatatatttttttttttaagacaagatcttgctctgtcacccaggctggagtgcagtggctggatcatagctcactgtaacctcaaactctcagtctcaagtgatcctcccacgtcagcctctttagtagctgggaccacaggtgtgcgccaccgtgcccagctaatttttgtatttttgtggagaggaggtctcaccatgttgcccagactggtcttgaattcctgggctcaagcgatccacctccctcagcctcccaaagtgctggaactacaggcgtgagccaccgcacccaggccattctcttagcattttgtattcccatcttttaaaaatggaaagcaggctgggcgcggtggctcacacctgtaatcccagcactttgggaggtcgaggcaggtggatcacctgaggtcaggagttctagaccagcctggccaacatggtgaaacttcgactctactaaaaatataaaaattagccaggtatggtagcgggtgcctgtaatcctagctactttggaggctgaggcaggagaatcacttgaacccaagaggcagaggtggcagtgagctgagatcgtgccactccactccagcctgggcgacagtgagactccatctcaaaaaaaaaaaaaaaaaaaaaaggaaagcaaactcagttctaaaaagtctacatggggccaggcacagtggctcacacctgtaatcctagcactttgggaggccaatgcgggtagattacctgaggtcaggagtttgagaccaacctgggcaacatggtgaaaccccgtctctactaaaaatacaaacaaaattagccgggtgtggtggcgggcacctgtagtcccagctactcaggaggccgaggcaggagaatcgcttgaacctgggaggtggaggttgcagtgagccaagatcatgccactgcactccagcctgggtgacagggcaaaactccgtctcaaaaaaaaaaacaaaaaagtctgcgtggtattttttttttaagtccaagtaatgaaacatttcctgatggcccatggtttcagaatatatggatataataggataccagtaaaatagttcttttctatcatgtgtttgctcatgcttaaccaggggcaatcataaatcactaatgggtcctaagcaaagttaaaaattaaattttttcattcattcatgtatctatgtattaatttattcatttatgacagggtcttgctctgttgcccaggctggagtgcagtgttgcattcatggttcaccaaaggctggagtgcagtgttgcattcatggttcaccgaagcctcgacctcctaggctcattcaatcctcccacctcagcctcccgagtagctgggactacaggcatgtgccactacacccagctaagtttttaaattgtagttggctgggcgcagtggctcacgcctgtaatgccagtactttgggaggctgaggcgggtggatcacctgaggtcggtagtttgagagcagcctggccaacatggtgaacacactagtctgtactacaaatacaaaaattaaaggccgggtgcagtggctcatgcctgtaatctcagcactttgggaggccgaggcaggtggatcacctgaggtccggaattcacaactagcctggccaaggtggtgaaacctcatctgtactaaaaatagaaaaaatttgcggggcttggtgacaggtgcctgtaatcccacctactcaggaggctgaggcagaagaatcacttgaacccaggaagcggaggttgcagtgagcagagattgcggaggtggaggatacagtagtgagcggagatcgcgccattgcactccagcctgggcaacaagagtcaaactctgtctcaaaaaaaaaaaaaaaaattagccaggcatagtgttgcatgcctgtaatctgagccacttgggaggctgaggcaggataatcacttgagcctgcttaagaggtggaggttgcagtgagccaaggtcgcaccactggactccagcctgggtgacagagcaagactctgtctcgaaaaaaaaaaaaatttgtagccataggatctcactgtcttggccaagctgatctcaaactcttggcctcaagtgattcttctgccttggcctaaccctttatttttaacaaagcatgagaaaacaagttattagctgcaagaaataaaggatgtaattgtaactccttcattgaaacttccttctaactctgtattacagaatattgaaatttgtgaatatcttctggctcctaattttgcacccctggcaattatgcagaagatgatcagaaatggaaaaagagcaggagggtacccagggctttgtgaataggtattaacaactggtttgttgttactgggttttttgtttgtttgtttttttaaggaaaccagaatgtatctattttaagctctccttccctatagttatcttgtcttgctgcattatccacttaatttatcattgttggccaggcgcggtggctcacgcctgtaatcccagaactttgggaggctgaggcgggcagatcacgaggtcaggagatcgagactatcctggctaacatggtgaaaccccatctctactaaaaatacaaaaattagccagacatggtggtgagtgcctgtagtcccagctactcgggaggttgaggcaggagaatgtcatgaacccgggaggtggaggttgcagtgagccgagatcgtgccactgcactccagcctgggtggacagagcgaggctccatctcgaaaaaaaaaaattatcattgttgttgacaataaatgtttttggaagtaatttggaactgttggtttgcaaatcacataataaaagccctcactttactgtagagtcacacttaacattagacaaaactatatatctagattgataactagaccgaactaggtggcttttggccattgctacaaattaaatccaacctggaaaaaatattcaggctgtaaaggcagttccaaaagctgtctccaaaaatcgtttgggacaacaatgtctcattctttttgtcttccatggtgctttgcctaactcctcgaagatagctcaaactcagaaaatgtttatctggttgagtcactttaataaaaatagtcttgttacctcatggttcacatgttatttatttatttatgaaacagtctcactctgtcgcctgggctggagtgcaatggcatgatctcggctcactgcaacctccacctcctgggttcaagagattctcgtgcctcagcctcctgagtagctggaattactggcatgtgccaccacgtccggctaattgttttgtatttttagtagagacgaggtttcaccatgttggccaggctggtctcgaactcctggccttaagtgatctgcccacctcggcctcccaaagtgctgggattacaggcttgagccatggcacctggcttatttatttatttattaagttataaagacaagatctcaccctgtcacccatgctggagtgcagtggcataatcatagctcactgaagcctcacccttctccactcaagcaattctcccacctcagcctcctgagtacatatgactacacccatgccccaccacacttggcttttttttttatttattttttttgtttgtttgtgttttgtagcaataaggtttcactatattgctcaagctagaatgcagtggctattcatagacacaatcatgtctgactatagccttgaactcctgggcgcaagcaatcctcctacctcaacctcctgagtagctgggactatagctgcctgcccagcttagattttaattctatgcatcaatgtgtatcaatgtatagaaatagttatgttatttaaacaaaagggatcatcctatatctgttgctttttgctgttttcttttttttagacagagtcttgctctgtcacccaggctggagtgcagtggtgcgatctcggctcactgcaacctctgcctccagcttcaagcgattctcatgcccctgcctcccaagtatctgggactacagacatgcgccaccacagctatttaattttaatatttttactagagacacggtttcaccatgttggcccgactggtctcagaatcctggccctaaatgatccgcccacctccgcctcccaaagtgttgggattacaggcatgagctaccgtacccagccagcttttttaatttaatacatacagcccagaactcctagactcaagcgatcctcccagtccacctcagcataccaaatagctgggactacaggtgcatgccactgtgtctggctggaagtcatttcacgtgaatactctgagatctgccttattggagatgatgtcaggatcacatacagtatgttatctatctcagataacatggtggctcatgcctgtaatcccagcactttgggagactgaggcaggtggatcatttgaggtcaggaatttcgagaccagcctggccaacatggtgaaaccccgtccctactaaaaaaacacaaaaattagccaagtgtggcggtgcacacctgttgtcccagctacacgggaggctaaggcacaagaatcacttgaacccaggaggtggaggttgcagtgagctaagattgcgccactgcactccagcctgggagacagagcaagactccgtttaaaaaaaaaaacaaaaaaaacactaaactaaaaaacgaaggaaaaagaaaacatggagttgttcctttggccacatgcatgcaaatctgtaagaaaagtaatgttgtagacatcaagggaatgggtactgttcacaaaggaatgccccacaactgttatcatgcaaaactggaagagtctacagtattaccaagcatgctgttgggattcttctaaacggacaagttaagggcaaaattcttgccaagagaattcatgtacgtattgagcacattattcactctaagaggtcaggagttcaagaccagcctgaccaacatggtgaaaccttgtctctactaaagatataaaaattaggtgggcatgatggtaggcatatgtaatctcagctactcaggaggctgaggcaggagaatcacttgaacctgggaggcgaaggttgcagtgagccaagatcacgccactgtactccagcctgggcaacagaacgagataccgtctcaaaaaataaaaataaaaaataaaagatcaatagactgtttaaaaaaaaaaaaacaaggataaatttatatagcatgttcagctctgaaaacatcagaaaggttgggtgtggtggctcacacctgtaaaaccagcactttgggaggccgaggagggtggatcacttgaatccaggagtttaagaccagtctggccaacatggcgaaatgccacctctacagaaaatacaaaagaaattagctgggtatggtggtgcatgcctgtcatcccagctatttgggaagctgaggtgggaggatcatcggagcctgggaggtagaagttgcagtgagccacaattgagcctctgcactccagactgggcaatggagtgagaccttgtctcaaaaaaaaaaaaaaaaaaaagggaaaaagaggccgggctccgtggctcacacctgtaattgcagcactttgggaggccaaggtgggtggatcacctgaggtcagaagttcgagaccagtcttgccaacatggtgaaacccgatctctaataaaaatacaaaaattagccggtcgtggtggtgtgtgcctgtaatcccagctacttgggaggctgaagcaggagaatcgcttgaacccgggaggtggagtttgcagtgagcagagatcgcaccactgcactgcagcctgggagacagagcaagattccgtctcaaaaaaaaaaaaaaaaaaaaaaaaggagctggaggatttgtgtcttgtatcaatgcccactttccaatgggaacttgcccacaaagttacattctagaatttatagttagacctagagaaggcaagtgagtcacccaaggtcacacatttacacagagttgagaacctagatatcctgactctgtaaagattgcttgcatttttttcccctagcccaggggttgacaaactttttctggaaagagccaaatactcaacattttaggcttagagggccatacaatctctataacatggccaattttttaaaaatttttttgagacagagtcttgccgcgttgcccaggctggagtgcagtggtgtgatctcagctcactgcaacctctgcctcccaggttcaagtagttttcatgccgtggtctcccaggaagctggaattacaggcatgtgccaccatgcccagctaatttttgtatttttattagaaacagggtttcaccatgttgcccaggctgctcttgaactcctgacctcaggtgatctgcccgcctcaggttcccaaagtgctggggttacagatatgagccctacagcgcccggccttttttttttcttttagtcagggtctcattctctcacccaggctgcagttgcagtggtaccatcagggctcactgcagcctcaacctcctaggctcaagccatcctcttgcctcagccttccaagttgttgggactgtaggcacatgctaccatgctgggctgttttgtttttgtttttgtttttgtttttttgagatggagtttcactctgtcacctaggctggagtgcagtggcgtgtgtctcagcgcacttcaacctctgcctcccgggttcaaatgattctcctgcctcaggctctggagtagttgggactataggcgtgtgccaccacacccagctaatttttgtatttttagtagagacagggtttcactatgttggccaggctggtcttgaactcctgacctcgtgatctgcctgcctcggcctcccaaagtgctgggattacaggcaggagccactgtgcccagctgtttttttttttcattatttttagtagacatgggggtctcatttaagttgcccagtgtggtctcgaactcctgggctcaaatgatcctcttgccttggccttccaaagtgttgggattacaggtgtgagccactgagtccagctacactgttaatttttgtagctgtaccattgtggcacaaaaacagccatagataatatgtaaacatatggcatgactggcaataaaatgttacggatactaaaatgagagtttcgtatacatttcatgagtcacaaaatgtcattattttgacttttgtcaaccttttatttatttatttatttatttatttatttatttatttattttttagacggagtttcgctcttgttgcccaggctggagtgtggtggcgcgatctcggctcaccgcaacctctgcctcccgggttcaagcaattctcctacctcatcttcccaagtagctgggattacaggcatgcgctatcacacccggctaattttttatttttagtagagatggggtttctccatgttggccaggctggtcttgaactcctgagcacaggtgatcgcccacctcggcctcccaaagtgctgggattacaggcatgagccaccgcgcccggctgtcagccttttaaaaaatataaaaaccattcctcactggaaggctgttcaaaaacggtggctgagatttgtcttgtaggccatatagtttgctcgtcccagttctagactctcaagcctagagaagcagaaatttctttacatgcatcttttttatttgtttgtttaagacagggtctctcggctgggcacagtggctcacgcctgtaatcccagcactttggaggctgaggtgggcagatcacgaggtcaggagatcgagaccatcctggctaacacggtgaaaccccgtctctactaaaaatacaaaaaattagccgggcgtggtggcggatgcctgtagtcccagctacttgggaggctgaggcaggagaatggcatgaacccgggaggcagagcttgcagtgagccgagatagcaccactgcagtccggcctgggcaaaagagtgagactccgtctcaaaaaaaaaaaaaaaaaaagacagggtctctctgtcacccaggctggagtgcagtggcacgatcactgcagccttgacctcctggactcaagcaatcctcctgcctcagcctcctgtgtaactggaaccatacacaggtgcatgccaccacaatgggctaacttttgcattttttattgtgacggggttttaccatattgcccaggctggtcttgaactcctgggctcaagagatcctcccacctcaacttcccaaagtgctgagcttgcaggcatgagccactgtgcccagcctacaagtctcatttctgtaatgatacagaagctactctgctataatttttaaaaaattaatagactattttgttagcagttttaggtttacataaaaattgaggccaggtgcagtggctcacgcctgtaatcccagcactttgggaagctgagccaggtggatcacctgaggtcaggagtttgagaccaccctgggcaacatggcaaaaccctgtctctactaaaaatacaaaaaattagccgggcatggtggcgcgcacctgtaataccagctacttgggaggctaaggcaggagaattacttgaactcaggaggaggaggttgcggtgagccgagatcgcgccactgcactctagcctgggcaacagagcgagactcaatctcaaaaaaaaaaaaaaaattgaagctgggcgtggtggctcacacctgtaatcccagcactttgggaggctgaggcgggtggatcacctgaggtcaggaattcgagaccagcctgcccaacatgaaaccccgtctctactaaaaatacaaaaatattagtcaggtgcggtggcacacacctgtactcccagctattcaggaagctgaggcaggagaatcgcttgaacccaggaggcagaggttgcagtgagccaagatcgcgccattgcactccagcctgggcaacaagagcaaaactccatctcaaaaaaaaaaaaaaattgagtggaaagtacgattcccatatatgcccttactactaccctccaccccattttccccaatctcagcattaacattagtgtgctacatttgttacagctgatgagccagtatagatccaataccgatacattattaactaatacctgtactttacattagggttcattcactctgtgttgtatattctatgggttttgacaaatgtataaacacatgtaggccggacatggtggctcatgcctgtaatcctaacactttaggaggccgaggacgggggatcactagagcccaggaggtcgagaccgtcatgggcaacatggtgaaacctcatctctgcaaaaatacagaaaattagccagctatggtgtcacatccctgtagtcccagctacttgggaggctgaggtgggaggatcacctgagcctgagaggtccaggctgcagtgagccaagatcacaccgctgtattccagcctgggcaatagagtgagaccctgtctcaaaaagtgaaaataaagacatgtatatactattatgcttgccagtttgtttatttgttttgctttgagacagggtcttgcgctgttgcccaggctggactgcagtggcatggtcgcagcacactgcagcctcaacctgctgggctcaagcgatcctcctgcctcagcctctcaagtagctgggattataggtgtgtgccatcatgcctggcaatttttttcttttttttagtagagatgaggtctccctatgttgcctagtctggtctcaaactcctggactcaagtgatcctcaccaaagcctcccaaagtgcaaagattataggcgtgagccaccatgcgtccggcttgcttgccgttgtttttgtttgtttgttttgttttgttttgtttttgagacggagtttcactcttgttgcccaggctggagtgcaatgccgtgatcttggctcaccacaacctccgcctcccgggttcaagcgattctcctgcctcagcctccggagtagctgggattaccaagtagctgggattacaggcatgcgctaccatgccagggtaagttttatatttttagtagaactgggatttcaccatgttgaccaggctggtctcaaattcctgacctcaagtgatccacccacctcagcctcccagggtgctgggattacaggcgtgaaccactgcacccagcctgcattttttttacaaacagattttcgccatgttgcctacactagtctcaaacccctgggctcatgtgatcctcctacctcggcctcccaaagtgctggaattaaaggtgtaagccaccgtgcccatccagttgacaaagtttatttctttttttttcttttgagagagagtttcactgttgttgcccaggctggagtgcagtggcgtgaacttggctcactgcaacctctgccccccaggttcaagccattctcctgcctcagcttcctgaatagctgggattacaggcatgtgccacaacacctggctaattttgtgtttttagtagagacggggtttctccatgttggtcaggctggtctcgaactcccagactcaggtaatcctcccgcctcagcctcccaaagtgctgggattacaggcatgagccactgcgcctggccgacaaagtgtatttcaaacactgcggagaattgttgtggtcttaattcatttggggtaatcggtattgtcattctcattgtcctcttgtgaggaggaattaggaacttatgtctctctagggaggctacagttttccttttggggaccattgtagtagagaattctcacattcacacatttcatttccctaaagttagtcaccggcccatgtgggtaatctctaaagaggacaacaagtatttagcagttatttcagagataattttctgccagcaaatatgggaaacttgcatgcatttttgaactctgcctcttcacatctatttagagaaatgttcccaagtctttgtaggcatctgagaagccaaaatccccaggcatttcccacagggcaggatcggttgtcgttttgagtgggtagcgatgggctgggtggcctattaagtgaaaacatggtgatctgtgcacccacaatgcctaggccctgcagacacaaatgcccaacttgttgacctgtgactcagacttagacccgaaaaggagatgttatatacactctgttctttattgaaataatccagcttgaatgagttggctggaaatataggatttgtaggaataaacggtcttccacatcaacataatggaattcagttgagaggaatattactggggatgtaaatatgctttaaacacaggctcgcggtggctcacacctgaaattccagcacttccggaagctgaggcaggcgatcacttgaggtcgggagttggagaccagcctggccaacatggcgaaaccacatctctactaaaagtacaaaaaaattagctggctatggtggtatgtgcctgcaatcctagctactcgggaggatgaggcaggagaatcgcttgaacccaggaggcggaggttgcagtgagccgagatcgtgccattacactccagcctgggagacagagcagcactccgtctcaaaaaaaaaaaaaaaaaaaaagaaaagaaaagaaaaaaaaaagaggctgggtgccatggctcacacctgtaatcccatcaccttgggagaagtttctcttaagcccaggagtttgagaccagcctgggcaacatggagaaaccctgtctctacaaaatatacaaaaattagcagggcgtggtggtgcatgcctgtagtcccagctactcaggaggctgagatgggaggatcacttaagcctaggagattgaggctgcagtgggctatggttgtgccactgcactccagtctgggcaacagagcaagaccctgtctcaaaaaaataaaaaaaagaaaagaataaaagtgttacaacaatgccagcactgtactggaagacagtaatcaaagaagtaaaactgtatctattcacagatgatgtgattttatagatacgaaatcctgaagaacacacacacacacacacacatacacacacaaacttattagagctaatacattccacaaaattagcatccatgatcaacacacaaaaacctcttacttgtatttctgtacactggcaacgaacaacccaaaaatgaaattaaaaacattctcggccagatgcagtggcttacgcctataatcccagcattttgggaggctgaggcgagcagattgcctgaggtcaggagttcgagaccatcctggccaacatggtgaacctctgtctctactgaaaataaaaaaattagccaggcgtggtggcaggtgcctgtaatcccagctactcagcaggctgagacaggagaatcacttgtacccgggaagcggaggttgcagtgagccgagattgtgccattgcactgcagcctgggcgacaagagtgagactttgtctcaacaacaacaacaaaaaaattatcaggcagaccccctgagtacaaacaaaaaattttttttttgagacggagtctcactctgtcgcccaggctgtagtgcagtggcgcgatctcggctcactgcaagctctgcctcccgggttcacgccattctcctgcctcagcctctcaagtagctgggactacaggcacccgccaccacgcccggctaatttttttgtatttttagtagagacggggtttcaccgtgttagccaggatggtctatgatctcctgacctcgtgatccgcccgcctcagcctcccaaagtgctgggattacaggcgtgagccaccgcacccggcccaaaatttttaattaaaaatgttttaaataggctgggttcagtggctttcacctgtaatcccagcactttgggaagccgaggcgggctgatcacttggtatcaggagtttaagaccagcctggccaacatggtgaaaccctgtcactactaaaaatacaaaaattagctgggtgtggtggcatgcaccagtaatcccagctactcagacgttgaggcaggagaatcgcttgaacccgggaggctgaggttacagtgagccaagatcacaccattgcactccagcctgggcaacagaatgaggctgcgtctcaaaaaaaaaaaaaaatttatggtagctcacacctgtaatcctaccactttgggaggccggggtgggtggatcacgaggtcaagagttcaagaccagcctggccaacatggtgaaaccccgtctctactaaaaatacaaaagttagctgggcatggtggtgtgcgcctgtaatctcagctactcgggaggctaaggcgaagaattgcttaactgggacccaggaggcagaggttgcagtgaaccaagattatgctggcactgcactccaacctgggctgcagagcaagactctgtctcaaaaaaaaaatttttttagtccgggcacggtggctcacccccgaaatcccagcactttgggaggctgagggcagatcatgaggtgaagagatcgagaccatctggccaacatggtgaaaccctgtctctattaaaaatagaaaaatttgctgggcgtgcgcctgtagtcccagctactttggaggctgaggcaggagtatcgtttgaacccgggaggcggaggttgcagtgagcccagattgcaccattgcactccagcctggcgacagggcaagattctgtctcaaaaaaaaaacaaacgaaagaaatgttaaaacttcattttacaatagcatcaaacatataaaaaatacttaggaacaaaagaggtccaagcctgggcacggtggctcacgcctgtaattccaggactttgggaggctgaagcgggtggatcacagggtcaagagatcgagaccatccttgccaacatggcgaaaccccatctctactaaaaatacaaaaatcagctgggtgggtacagtggcacacgcctgtagtcccagctactcaggagacggaggcaggagaatggcttgaacctgggaggccaaggttgcagcgagctgagatcgcaccactgcactccagcctggtgacagcgcgactccgtctcaaaaaaaaaaaaaaaaaaaggcaatattacctcagttgatctgtagatttcctgtctgatatctctgtcagagtaccagctgggtttgacaagatgaccctaaagtccatataaaaactcaagggctggggccaggtgcagtggctcacgcctgtaatccaagcactttgggaggccgaggtgggcggatcacctgaggtcaggagttcaaaacctgcctgaccaatatggcaaaacgccatctctactaaaaataacaaaaattagctggttgtggtagcacgtgcctgtaatcccagctactctgggggttgaggcaggggaatcgcttgaacgtgggaggtggaggttgcagtgagctgagatcgcgccactgcactccgcattgttgacagagcgagactctgtctcaaaaaaaaaaaaaaaaaaggcctggtgcggtggctcacacctgtaatccaagcactttgggaggccaaggcgggtggaccacgaggccaggagatcgagaccatcctcactaacacagtgaaaccccgtctctactaaaaatacaaaaaattagtggggtgtggtggcaggcacctgtagtcccagctattcgggagactgaggaaggagaatggcgtgaacctgggaggcggagcttgcagtgagccgagatcacgtcactgcactccagcttgggcaacagagagagactccgtctcaaaaaaaacaaaaaacaaaaaacagggacacagaataaccaaaacaatcttgaaaaagaggaacaaagtcggaggagtcacagttccttatttattttatttattcatgtttttattgttattgagatggagtctcactctgtcgcccaggctggagtgcagtggtgcaagctcagctcagtacaacctccgcctcccaggttcaagtgattgttctgcctcagcctcccaagtagccgggattatatgcatgcgccaccacacctggctaatttttatatttttagtagagatagggtttcgccatgttgggtgttggccaggctgatctcaaactcctgacctcaggggatccacctgccttgacctctcaaagtgttgggattacaggcgtgagccactgcacctgagcttgtatttattcatctattttatttatttatttatttgagatggagtctggctctgtcacccaggctaaagtgcagtggcacgatctcagctcactggaacctctgcctcccagttcaagcaattctctgcctcagcctcccaaataactgggattacaggtgcctaccaccatgcccagctaatttttttgtatttttagtagagacggggtgtcaccatcttggccaggcaggtcttgaactcctgatctcatgatccacccgccttggcctcccaaagtgctgggattacaggcgtgagccaccatgcccagcctatttatttttcttgaacacagtctctgtcactcaggctagagtgcagtggcatgatctcagttcactgcaacctctacctcccaggctcaggtgatactctcacctcagtgtctccactaactggaacttcaggtgcccaccaccatgcccagctaattttttgtatttttggtagagaagaggtttcaccatgttgcccatgctggtccccaactcctgagctcaggtgatccacctgcctcggcctcgcaaagtgctgggattactggcatgagccactgtgcctggccgactttgagttatttattattttaatttaatttttgaggcagagtgtcgtcactttgttgcccaggctgggtggattacaggtggcacggtatcagctcactgcaccctccacctcctaggctcaaacgatcctcccacctcagcctcccaagtagctgggattacaggtgcatgtcaccatgtccagctaattttttttgttgttgttgttgagacagagtttcactcttgttgcccaggctggagtgcaatggcatgatctcggctcactgcaacctctgcctccctcctgggtccaagcgattctcctgcttcagcctctagagtagctgcgattacaggtgcgcaccacatgcccagctaattttttgtatttttagtagagacagggtttcaccatgttggccaggctggtctcgaactcctgacctcaggtgatccacccatctcgccctcccaaagtaaatgggattacaggcgtgagctaccgctcctggcctgtccaggtgatttttatatttttagtagagatgaagtttcaccatgttggccaggctggtctctaactcctggccttacctgatctgcctgcctcagcctcccaaagtgttgggattatgggcatgaaccgctgcctgactttaaatcttacttcaaagcacagtgacataaggatagatacgtagaatagaatagagctgacagtccagaagtaaaccatgtagttatatggtcaactaacttttgacaagggtatcaagaccattcattgggggaaagaacagtctcttcaacaaatactgttgagacaacgcgataagccacatggagtgaagttggacccttaccttacacgtatataaaaattaacttggccagaggcagtggctcacgcctataatcccagcactttggaaggccgaggcaggaggatcacttgacatcaggagttcgagaccaacttggccaacatgatgaaaccctgtctctactaaaaatacaaaaagtagccaggcgtggtggcacaattttgtaatcccagctactcgggaggctaaggcgtgagaatcacttgaactgaggaggcagaggctgcagtgagctgagactgcgccactgcactccagcctggacaagagaatgagattccatctcaaaaaaaaaaaaaaaaaaaaaaaattggccgggcgcggtggctcacgcttgtaatcccagcactttggggaggccgaggcaggcggatcacgaggtcaggagatcaagaccatcctggctaacaaggcgaaactccgtctctactaaaaaatacaaaaaaattagctgggcgtggtggcgggcgccagtagtcccagctactcgggaggctgaggcaggagaatggtgtgaacccgggaggctgagcttgcagtgagctgagatcgcgccactgcactccagcctgggcgacagagccagactccgtctcaaaacaaaacaaaacaaaacaaacaaaaattaaaatgaactacagacctaaatatgagctaacattattaaattattggaataaaacatagaagtaattttttttttttgagatggagtctcactcttgttgcccaggatggagtgcaatggcatgacctcggctcactgcaacctccgcctcctgggttcaagaaattctcctgcctcagccttctgagtagctgggattacaggcacctgccaccacacctggctaattttttgtatttttagtagagacggggtttcaccatgttggctaggctggtctctaactcctgacatcaggtgatccacccgcctcagcctcccaaagtgctgggattacaggcatgagccacaacgcccggcttacaagacttttttttccagatggaatctcgctctgttggctcaggctggagtgcagtggcgtgatctcagctcacttcaacctccacctcccaggttcaagcgattctcctgcctcagcttcccgagtagctgggattacaggcatctgccaccatgcctagctaatttttatatttttagtagagacggggtttcaccatgctggccaggctggtcttgaactcctgacctcagaccatccacctgccttggcctcccaaagtgctgggactacaggcatgagccaccatgcctggctacaaggcttttaaaaattagctgggcatagtggtgcactcctgtagtcccagctaatcaagaggctgaagtgggaggatcacttgaaaccaggatttggaggccgcagtgagctgctgtggtgccaccgcactccagcctgggcaacagtgagatcctgcctgtaaaaccaacaacaacaacaacagaattatgtagtttcaccaagaggtggaaggtggaagagcctcactgacattcagaccaatttaatgacaggtcttggattgacatatacatattttgaaacgaaattttgctcgtcgctcaggctggagtgcagtgatgcagtatcagctcactgcaacctctgcctccagagttcaagtgattttcctgcctcagcctccagagtagctgggactacaggcacctgccaccacgcctggctaattgtgtatttttagtagagatggggtttcaccacgttggccaagatgctctcgatctcctgaccttgtgatctgcccgccttggcctcccaaagtcctgggattacaggcatgagccaccacacctggcctgatattttatttttttgagacaaattcttgctctgttgcccaggctggagtgcagtagcgcaacctcgactcactgcagcctctgcctccctggttcaagcgattcttctgcctcagcttccccagcagctgggattacaggtgtgtgccaccacacccagctaatttttgtatttttggtatagacagggttttgccatgttggccaggctggtcttgaactcccgacctctactgatccacctgcgttggtctcctaaagtgccaggaatacaggtgtgagccaccatgcctggccgggtcttggatttttataagaagaaaaaaaaggtgtggggtaggggagagccaggtgcagtagctcatgcctgtaatcctgggaggcagaggttgcagtaagccaagatcacgccactgcactccagcctgggcaacagagtaagactgtctcaaaaaaaaaaaaaaaaagaaaaaaaaaagaaaattaaggaaataaagcagttccactagtgatgtttttctgcactactgtttaatgctaccgacatttttgccttaagagaacaagcttaaaaggcatgctcaccctgcgattaagacgcatctacacaacacaaacggatgctgagcagaaatgacccagaggcaccatcgtcttttcaagcagtttatttccattttcagttctaatgttgactttttcataaatattcacctggaatctccactaaggctcctcatgagcagggcccaattcctagaatgtgcttggtgagttagcccctggtatacagtagaggctcggcaaatattctacagcctcctttctaatgatttcccagtggccagcgtttcccaacatgtgagatgtacagttcaaaaggccacagggaaactgacacagcagggccatttcaaaaggggaggatcttccaattcttctgattttaggaaattctgttgcgtgctaaccttgaacacatgctagcctccctttctcagatttggaaagatctaaagtaatagttatttctctaaaatgaaacatatatttcattttatatatatatatatatattacagataccttctatctatggcaatttatgttggattattccacctatggcaatcacatcaagttttctttcctttttttttaagagatggggtcttgctatgttgtccaggttggtcttgaactcctgggcttaagctatcctctcaccacggcctcccgaagtgctgggattataggtatgcatcaccgtgcctggccaaattctctttgtaaatacatttgagtggtagtaactaattttaaaggaaaaaaacctgaagtaatctagaggtggaacacaaatgaggtaaaatattagagaactgattcagcaaggactaaagattgggacgcaatgccctctgcacagtctggttcttgaggttgcggtgggtgtgtttccagtggcgtaggtcggtcagatacttctggcctttgggagtgcgtggatgtgacgcggtcagtgccacatgtgaaccaggtgctgcgaagtcctgtgaaagtcacacaccatatggtgcactacaaaggtataggttaaaggctgaagcttgaaacatacaaaaaaaaatcctctatagagcaagatatattcctagtattcagctgttcccaaccaaataaaaaaaaaaattaaggaaaaaaataaaaaaggaagcattccatcagtggctgtattgaacaagtaatgtatcatcaagatataatcacccaacctttattattccaagtgcactactgtcaagagacatgttacagccgctaaggacaatgtacttcagctttgaaacctgggcaagaagccacacgactgcatgagacaagccgtgagaggcactgctcaggaggaaacgctgggtctcttcaccaaaattagattacagcatattctgggagcacacgcccttgtactgcttacaaaccaagggagaaagaccaacgcatccatcatcccaacgccttccctggaacagggaaatgagcatcattctgtgggaacagcgtctttagactctgcatcagtttgttccacttcagcatccgcggcagctggggcaggagcaactctggtttgggcactttctgcctctgctgccattgtctcggcgccatttccagcctctgcagcctcacttctggccttggggacgcccttctcatgtgccgttccacagggcacctgctcttccagcagctgttcggcttgaggatcactaccggcctccgctgtgtccgtggggccttcgtcctcagccggctccccgctgctctctggagcgggcgctccttccccatctacggccctcactgctgctgtaatcacctctgctaagacgtccgcggccacctcctcaggtgtctctttcttatcctcacctcctaaattgtcatctccttccatttctggatcaacagtttcactggtgaaagggtcctcaccctggccaaagaggaaacaccggtcagcgtggtgtaagcagagctcaggaggcccatgattgcggggatgtcagcttttcagaaccagcagtccacaagggaaacacttctgtaaattatgccacaggagtgaatcctacatgttctcagagcctacagattcagaaaacacctcggggagatattctgcaattttttttttttttgagatggagtctcgctgttgcccaggctggactgcagtggtgcgatctcggctcactgcaacctccgcctcctgtgtttttagtagagatggggtttccacccacctcagcctcccaaagcgctgcgattacaggtgtgaaccaccatgcccggcccattctgcaatttttttttttttgagacggagttttgctttgttgcccaggatggagtgcaatggcgcgatctcagctcaccacaacctctgcctcctggtttcaagtgattctcctgcctcagcctcctgagtagctgggattacaggcaggagccaccacgcccggctaattttgtatttttagtggagacggggtttcaccatgttgggcagactggtctggaactccagacctcaggtgatccgcctgccttggcctcccaaaatgctgggattacaggcacgagccaccgtgcctggcctgcaatttttaatcaagcatgtaccagcgaggaaaagttcacaagcccagccttaacttgatgttttttaaaaaagggcatgaggccgggcgtgatggctcacacctgtaatcccagcactttgggaggccaagatgggtggatcacgaggtcaggagatggacaccatcctggctaacacagtgaaaccccatctctactaaaaatacaaaaaaaaaaattagccgggcatggtggcgagcgcctgtagtcccagctactcgggaggctgaggcagcagaatggcgtgaacctgggaggcggagcttgcagtaagtcgagatcacgccactgaactccagcctggcagcctgggcgacagagtcagactccatctcaaaaaaataaaataaaataaaataaagggcatgtaataggaagttaacactacgtaatattttagtttcattaaggtacagtggctcacgcctgtaatcccagcactttgggaggctggggctggaggactgccggagctcaggagttcgagaccagcctgggcaacgtggcgaatcaagattcaaatccaagtctgactccctcagaagtcaaaattctcctaagtatatgatagaaaactatctgtagtctaaaacaagcaaactaaaagttatcattaccagattaggaaacatgttttaaaatatgatgcttagggcaaggtgctcacgcctgtaaccccagcaatttgggaggtcaaggcgggaggatcacttgaggccagaccagcatgggcaacagagcaagactgtcttaaaaaattagccagcatgtggccgggtgcagtggctcacgtctgtaattccaacactttgggaggcggaagcaggcagatcacaaggtcaggagatggagaccatcctggctaacacagtgaaaccccatctctcttttctttttttgagacggagtcttggtctgtcgccaaggctggagtgcaatggcgcgatcttggctcactgcaacctgcacctcccggattcaagcaattcactgcctcagcctcccaagtagctgggattacaggtgcccgccaccacgcctggctaattttttttttatttttagtagagatggggtttcaccatcttggccaggctggtcttgaactcctgacctcgtgatgcacccgcctcggcctcccaaagtgctgggattacaggcgtgagccaccacgcccggccaccccatccccctgcaaaacattagccaggcatggtggtgggcgcctgtagtcccaggtactcaggaggctgaggcaggagaacggcatgaacccaggacacagagcttgcagtgagccgggatcgcaccactgcactccagcctgggtgacagagcaagactccatctcaaaaaaaaaaaaaaaaaaaaaaaaaaaaaattagccaggtgtggtggtgtactattgcagtcccagctacctggcaggctgagtggggaggatctcttgagctcaggaattcgaggctgcagagaatctctgcaggaatctcttggctgggtaccaagagaacaagaccctgactcaaaaaaaaagacgcttagaagcctgagctcacacttgactctggaaacttttaccttgcttaagctgcaaaggtaaaatatacatcagtcatgtttcctccctctttttttttttttttttttttttgagacaaggtctcactctgccatccaggctggagtgcagtggcacgatcttggctcactgcaacctccgcctcctgagtagctgggaccacaggcgcatgccaccacgcctggctaatttatgtattttttgtacagacagggtttcaccatgttgtccgggctggtcttgaactcctgaactcaaagtgatccgcccaccccagcctcccaaagtactgggattacaggtgtgagccaccacgcccggcccagtcatgtttcttcaattggttatttagattctgtgcctttaatagatggaactgtcaaatatggaagtgtttagtaactgagaggagggcaaaggtcctgaagtcaggttgtgggctgggacttagccacctgccccaaatgctaaagtcctgggatgaacactgagcaaaatgggtttcacaaggaagaactgggagctcttccaaccagccttctctccatgagcacccactttgggacttcgatatgctgctcccatcatgaaggctctggttcttcactacccctcaccttcaacctcactgtcagttggctctatcaatgaaatctctttttagcttctctcctggaaaattctcatgtaccttggattctttttttttttttgaaatggggtctcactctgtcacctgggctggagtgtagtggcgcaatcgttaactcctctaactcctgagctcagggatcctcctgcctcagcctcccaaactattggcattacaggcatgagccataattcccggttccccgctttcctttattttcaagaccagtcttgctatgttacccaggctgaagtgcagtggtaacaccatcactcactgtagcctcaaattcctgggctcaagcaatcctcccatcccagcttcccgagtagggctagccttgggtttttcttaaaaaatcacctaaccatcatttgctcagaattttaaggctaaacaatcaggatttttcatggtaaaaatccattacgcactgattaatcaagcagcgccacatccccagagtccccaggcaagcactgactcattagaaatcccagttgtcatgttcctgagcttgatgcattccagtgtccctcaactgtcaaaagactcagaaatgctaaatgctgcactctggattcaactccctgctcctggggttcatcttcccttttgaaagcttttcctgtctgtggtacttgcaagcacaaaccttgaggtatttttccagcatcttcactatatgtctgttgttcaaaacactcttagccacatggagactggttttcttgaactgttcagcagccaactgcaaagggaaccaaatgtgagctcttaaaaatggcaaagattaaggaagagaataaaccagccaggctctgccgagtcatcctgagatcagccctatgcagagaagcgaatctcaaaacgccagcctccaagaatagaaggctccagagactgtgcaaccaagactaacaaactggaaaagctaggcaatcttaagagataaatgcaaagatgcaccactgatacccatgtagcacatgcagaattgggggtgaaacaagagcatttacaaatgaaaggctgtgtggactcagtggaggaaaaggacaagctctttcttttcagtttttggggttacattgatttcataagttcaacaacaaaagtatgaatatgctgggtgtggcagctcatgcctgtaatcctagcacgttgggaggctgaggcatgtggatcacttgaggccaggagttcgagacaagcctggccatcatggtgaaaccctgtctacaaaatataaaaattagctgggtgtggtggtgcacacccgtaatcccagctactcaggagactgaggcatgagaatttgggagatggaggttgcaatcagctgagattgtaccactgcattccagcctgggcaatggagtgagactctgtctcaaaaaataaaattaaaaacaaaaacaaaaacaaaaaacaaacacacaaccatgactgcaccaagtctctgttttagagcctgacttgtttgcacaatggtcccttgtttgtatactgcttttcagctgatctttaacagtactggggctgggtgcagtggctcacacctgtaatcccagcactctgggaggctgaggcgggtggatcacctgaggtcaggagttcaagaccagcctggccaacatggtgaaaccccgtctctattaaaaatacaaaaaattagccgggcattgtggtgggcgcctgtaatcccagctacttaggaggctgaggctggagaattgcttgaacctgggaggcagaagttgcagtgaactgagatcgtgccactgcactccagcctgggcaacaagagtgaaactccgtaaaaaaaaaacaaaaaaacaaaaacgtaaaccaaaaaaccaaaaccaaaaccaaaaccaaaacacagtactgtgagatgggtgagcagctcttgacctccccatttaatagctgagtaaactaaggagagagctgctaacccagggccagaaagtgacaggctgcagagcaaacgcagccacaggcactcttcactgtctgcttttctgcactgacagcaggtagagctgttgctggatagggcctctatggtctgcaatgctaaaaatactcatgatctgactctttacaaaataaggtatttttccagcatcttcaacacttgacccctgggctcaacatttagcctgaagccccagcagctaggtaaggacagaaccagtcctttagtccaagtcccctgggccactcagctttcaatggcccttcggtctcagcttatggaagcccccaggccttccgctagtgggaaaactgaccaacgtggaaacactatcaggagaatctcagctactgcatttaatcgagtctaagcaacacattttctcacatttttataaaaattgagacgaatcttacgacccatcgatggaagtgatagacttgaaacatagcaagaacccctaaagatgttgttattccccataagacacagcaggctctgagccgcagccctgcaatgagcaccccaggcagtgtggggaggaagactcaccctgcggttgtgattgtggtccacggagtgcaggtgccgctggaggagctgcggctgtgcaggaattagcatgtcgcaggccaggcagtgagcagcctcgatcttcttgaagaagtgctcctggccaatccctgccaggaaacgcatgtcttgtaggatctgggacagcaagtgatgctttcctcctactccccatctgggcccacgttttctccctgcaactctaaggaatcagaagggcacagcctgcctttctatggggagtatgggtcagcacatcggcctctatagctgtgaattctgcacttttcagcttttctgttcctcctggttgtttcttttcaaaccaaggaggaaaagatatgaaagtgcttaatgtcactgatataagctgcaatctatgcaaggccacatccgaaggtttctttccattgctgctgagcgctcttcccacgggtctcgtcatcaccttctcagccaacttgggctggcttcatgccactttttttttttttttttttgagacagagtcttgctctgtcgcctaggctggagtgcagtggtgcaatcttggctcactgcaagctctgactcccaggttgacaccattctcctgcctcagcctcccaagtagctgggactacaggtgcccgccaccacgcccggctaattttttgtatttttttagtagagacggggtttcaccgtgtcagacaggatggccttgatctcctgacctcatgatccgcctgcctcagcctcccaaagtgctgggattacaggtgtgagccaccgtgcccggcctcgtgccacgttttacgggtcctgtcacatgccttactaccatccaggaaagcactcatcctgggatgacaactcacctttgaaaggatctggttttggttttgcggtttctttctccatcaattcctgacgccgcttctcaattttcttatttctgtttacaatgtattcctaggtgggattggagagggcataaagtaaaatgagaggtgggcgcatgtgggcatttctcaactgccagggctaggcaggcagctatcagagcagctgcgtggggcagcacagcacgatggctggagctcccggttgtccctgtgactcagggacttacacagctactctatctgggaaaggaaaccttggccaagtatagcctctgatttcccttcctccttcaagggatccggcacctgcgggatgggcaagagacgcggtgacggggcccaggtttcctttacctggaggaactccacggtcttgtcgggcagcttggtgcttatgaaccgcagggtctctttgtgaaatttgctttgcagatgcttctggatctcttcgtcatcaaagctacggaacttgcatacagaacaggcaaactgaattctgtagaaggaaaacaaggaggggagtgaagcagggagcatcagcgagtgaagcagggggcatcagctcacctctgaggagagctgaaatagaaacaggattttcagctctccccctccccctctccctctccccacggtctccctctgatgccgagccgaagctggacggtactgctgccatctcggctcactgcaacctccctgcctgattctcctgcctcagcctgcctactgcctgcgattgcaggcgcgcgccgccacgcctgactggttttcgtatttttttggtggagacggggtttcgctgtgttggccgggctggtctccagctcctaaccgcgagtgatccgccagcctcggcctcccgaggtgccgggattgcagacggagtctcgttcactcagtgctcaatggtgcccaggctggagtgcagtggcgtgatctcggctcgctacaacctccacctcccagccgcctgccttggcctcccaaagtgccgagattgcagcctctgcccggccgccaccccgtctgggaagtgaggagcgtctccgcctggccgcccatcgtctgggatgtgaggagcccctctgcctggctgcccagtctggaaagtgaggagcgtctctgcccggccgccatcccatctaggaagtgaggagcgcctcttcccggccgccatcacatctgggaagtgaggagcgtctctgcccagccgcccattgtctgagatgtggggagcacctctgccctgccgccccgtccgggatgtgaggagcgtctctgcctggccgccctgtctgagaagtgaggagaccctctgcctggcaaccgccccgtctgagaagtgaggagcccctccgcccggcagccgccccgtctgagaagtaaggagcccctccgcccagcagccaccccgtctgggaagtgaggagcgtctccgcccggcagccaccttgtccgggagggaggtggggggatcagccccccgcccggccagccgccccgtctgggaggtgaggggcgcctctgcccagccgcccctactgggaagtgaggagaccctctgcccggccagccgctccgtccgggagggaggtgggggggggtcagccccccgcccggccagccgccccgtccgggaagtgaggggcgcctctgcccggccgcccctactgggaagtgaggagcccccctgcccggccagccgccccgtccgggagggaggtggggggggtcagccccccgcccggccagccgcaccgtccgggagggaggtgggggggtcagccccctcgcccagccagccgccccgtccaggaggtgaggggcgcctctgcccggccgcccctactgggaagtgaggagcccctctgcccagccaccaccctgtctgggaggtgtacccaacagctcattgagaacgggccatgatgacaatggcggttttgtggaatagaaaggcgggaaaggtggggaaaagattgagaaatcggatggttgctgtgtctgtgtagaaagaggtagacgtgggagacttttcattttgttctatactaagaaaaattcttctgccttgggatcctgttgatctgtgaccttacccccaaccctgtgctctctgaaacatgtgctgtgtccactcagggttaaatggattaagggcggtgcaagatgtgctttgttaaacagatgcttgaaggcagcatgccaagagtcgtcaccactccctaatctcaagtacccagggacacaaacactgccaaatctccctctgcgagaaacacccaagaatgatcaataaaaataaataaataaataaataaataaataaataaataaattggcagtgggcaaaaaaaaaaaaaaaaagaaacaggattttcagtaattttttttctttcctttttttttttttttttttggagatggagttttgctcttgttgccgaggctggagtgcaatggtgcgatctcagctaaccgcaacctctaacacccaggttcaagcgattctcctgcctcagcctcccgagtagctgggattacaggggcccgccaccaagcctggctaaatttttgtatttttattttattttatttatttatttttttgagacggagtctccctctgttgcccaggctggagtgcagtggtgcgatcttggctcactgcaacctccgcctcccaggttcaagtgattctcctgcgtcagcctcccgagtagctgggattacaggcgcccaccaccactcccagttaatttttgtattgtgagtagagacgtggtttcaccatggtggctaggttggtctcgaactcctgacctcgtgattgacccacctcagcctcccaaagtgctgggattaaaggcgtgagccaccgcgcccagcctattttttttttgtatttttagtagagacagggtttcaccatgttggctaggctggtctcgaactcctgacctcaggtgatccacctgccttagcctccccaaagtgctgggattacaggcgtgagccaccgcacccagacttttctttttctcgagatgagatttcactgtattgctcaggctgttctcaaactcctgggctcaagcgatcctcccacctcagcctcccaagtagctgggattagaggtgcatgccaccgcactcagccagggaaagtggctgctgaaccaagagttccgacttcccaaagggcaacagaatggcagttacccaaacttccccagctgaagaatgggaacacaggcttgcaggtatctcaggaaaatgactcgcatagtaatctgctggcactgcagcccctctggccccaaagcccctgagaaaacaccagaaagctgcaactgcttggaactggggacgccctaggctctggctggcagctcttggggcccagcatctagcttcacagcttctcagatgagttcctctctgcaggaactgggatgacataaggcaacctcattttacgtgcagacaaaacacctcgcacaattcaaaacacaaaacccagtatcagttctgccatgagactacacgtaaagacatgtcacatcaaattctacagataaaaagtgaggcttctttgtcacaggctttcaaagtctccccaaatgcaaccacgctgcatggcaagggagagcagcctgcaggcccccaggccaccacactggggtgctccctccctggctctctcctggaggctcctgccccttctggtgtaggggtgcaggccctgtggcactcaggacttcacctctgccaactccacatgcctggcttctgacctctgacaagcaacatgaagacacctccgcttctgcagacagcccctacgtaggcggggaggggacaatctcccggggctcatacacagcactgtcaggaagctactgatgagctgtgtgcttccctgctacacctctgcctccccgtgagaattcctccaagtcccttcgagatcctcagtcatggccaggcgcggtggttcatgcctgtactcccagcactttgggagaccaaggtgcgtggatcacctgaggtcaggagtttgagaccagtctggccaacatggtgaaaccccgtcactactaaaagtacaaaaattagctgggtgtggtggcgggcgcctgtaattccagctacttgggaggcggaggtaggaggatcacttgagcccaggaggtggactgttgcagtgagctgagatcgtgccactgcactctaggatgggtgacacagcaagactccatctcaaaggataaaaaaaaaaaaaaagaaaaagatcctcagtcactagcgcacactctgaaggtttctttttttttttttaaaaaaagtcacctgttcattggaagaacatacaagatgaaaaaaaagcaaaaagaaaaaaaaaaaaagcaaaaagtagtaaaaaaaaaatgtcatctctatacccttctcccagtactctgggaggccaacgcaggaagatctcttgaggctagttcaacagcccaagcaacagagaaagacccctatctctttattagattatttaagtttaaaaataattaaaaagaaaatgtcatctcagtttccatgtgacatgaaaagtcatctactctatccatttatctgtttaaaataacaagggtttcaatgttcctgtaccacttaagaagaaacagttctgcgtttggttcctggcttcgttttgctaagcatttctctcttttttttttgaatccttgatttaaggttcacatggaacagtgattttctttttttttttttgttcctgagatggagtcttgctccgtcgcccacgctggagtgcagtagcacaatctcggctcactgagatggagtttttatttgagatagagtttcgctcttgttgcccaggctggaatgcagtggtgtgatcttggctcactgcaacctccacctcctgggttcaagcaattctcctgcctcagcctcccgagcagcggggaatacaggcatgcgccaccatgccggacgaattttgtatttttagtagagactgggtttctccatgttggtcaggctggtctcgaactcccaacctcaggtgatccgcctgccttggcctcccaaagtggtgggattacaggcgtgagccactgcccccagcccgtttctttttctttttgagacagagtcttgctctgtcgcccaggctggagtgcagtggtgcaaccttggctcactacaaagtccacctccccagtttaagtgattctcctgcctcagcctcccgagtagctgagattacaggcacctgccaccatgcctggctaatttttgtaattttagtagagatgggtttcaccatattgaccaggctggtcttgaactcccggcctcaagcgatccgccagctcagccttccaaagtgctggaattacatgtgtgagccacggcatctggccccttttactaagcatttctttgaacacgacaatcactgcccagactgggcgcagtggctcacgcttgtaataccagcactttgggaggccaaggcgggcagatcacaagatcaggagtttaagaccagccttgccaacacggtgaatcccgacctctactaaaaatacaaaaattagccaggcgtggtgtcaggcgcctgtaatcccagctactcgggaggctgaggcaggagaaccgcttgaacctaggaggcagaggttatagtgagccgagattatgctattgcactccagcctgggcgacagagcaagactccatctcagaaacaaacaaacaaaaagaaaatcactgtcccatgtgaaccttaaggtcaaggattccccagcatcacatgatcactggtgatttcagtttctagtcagaagccacttaactcctggcagggagaggcaggcacatggtgtgctcacaatgacatcctttgggctcaacatttttgcaatccttttctattgtgggacaaaatcttgatggtaggatcatctctctacctgtctcctagctgtgtcaaactccaggggtggtctggatttggataaggtgaacacaggacagtgtctgagatgccagacaccaggctagggggcagggatgcccctcaggcctgcaggagagtaacagagcccgctgctgagcagttatggaccacacagacccaccagcaaggctgggattccagaggaatagagacacaggagtcaaacaccaatcctctaaagcaagaacagaaacctaaccaccaaagcaacgtcccagccatcctagaagacaggtagctcgtgtgctgggagcacgagtgatggtcttttctgcactcccaattgtttactgttttgcctcccactggtttggccagaggagtcaggccaccaggcccccagcattgtggagcgaggacaggtgagctcggcagcgcctccaccgcacgagtccacctcctcctgtggggtcgtgtgcccgcgcctcacctgtcggctgcacggtcccgcgtcctgtctcttctcctttgcttttcccttctcttcttcacatcctcgtcctcgtcctccttctctcctgtaacagacaagtcccttcgagacgctctgagtggcctgcaaaggagctgagctccagggcctggtcggggggctgcagcttggccaccgcaccctgtgccctgccactgcctgcaccacgcggcagggtccaggatgccccaaggcactgtcagagactcctggtggacacgggcctggagtgagagcccggagtagtcaccaaactccccacatggcctgaggcggccaggatgggctagggacacagcctgcccaccccatgtgcaccacagccccctgctccctctgtcctccccattctgcttgtccaatctcatgccctgcgatggggtcttctcccaatatcacaggagaagccaattctccccggatgaagaggcggcagctgaaggcctcaggaagtgaagcagctgctccgccgccctctatcccacctctaggtggactgtgacgagcgtcctggcggccccgtctgaactagggcctcagcaggtctgacagtccttgctggcccgacctctatcttccactcacaaaaaccgtcaatctagggctttcccagggctgcgtgggaagcaatcctagaaaaaaatttgggaagagaccaattggtcctcccgtccgtcccccggggccagcagaggagctcctcggagagccacgcggccatcatcccagcatgaggccagggacggacgctgaaaaaaggttggagaagcatctgaactgtaacccctacccctgatgccagtcccgagactgtcccacgaagatggcgaccggcgtgcgctgctcagaagcctctcaaaagggcgtgtgggatttttggcaagaggtcactgcctgaaactatgactgctgtttaatagcaaagtcatcccgggtaggtagcaggacctgcgcgcaacagacatgtcacctttgctttagcattgtgccgctaagcgctcggggcgccccgtgctatggacaggactgctgcgggtcgcgggggggaggaccgcagagggctggcaaagcctgaacaggaggaacatctaagccaagggccttcagaatggatgggagcagggccactgaggagccagcctatgatccttggggtaaccagctacggaaagacccacaggacaggtaaagaaacgagtggcttcagggtgagctccaggccgcggcacctcaggccgctctgccatgagggatttaagcctgctctgctgttgctgcagaccctctggtctcctgcattggacatgaagagacctgctgaagggcgcccgcctctcaaagacccagtgggcctgggtgctcccgaccccgcaggtgtctgctgtcacacactcgcaggcacgaagcaatgtgcagtgcagctgccagtatccccaccacagaggcccacagcacagcccagggcaggcgactgaaggaactggacaaaaggaagccccagagaaaacacttcagggaaatgcactggccgaggagggcacagaagatgggctgggggcctcttctctcatgtttctccttccctacaaacttcgactgtggtggacacccaaggctgccccccatccccactgcagcccacatcgggtcaggcagacagacccgtttccagtaaatgctgccccagacactttgaagcaaagtgttggctgatcgccacggtcaaggcccatctggtggctgcagcccctcttcccccacagccacgggcccctccatccaggcccctggcttgctcagaagctgggcagtaagtgcggggcagctgggaagacacaggaaagctgcaagggacacggtgatgcctacctctttgcctcccagagtcgcagagttcatcctcctggaaaagagtatacacaaagtccggcagtgagctggtgtgtccagactctccacaaccagcccagtccctggccactgcctggtgggcagtctcacccaagacctaggttgctatgccaccaagaatgagccacagtgtgttaggaccagcctccggggctcaggacagggcctgtgtgtcctgttattactcctagttgccttcagagattctgtgacaatcaccttgctaaaaagccattcacccaccctctctcggttcctcctaagctgcagaactgcctgccccatgacaaagacccacccgtacaattctatgaatggagcctgttcaccaaccgtagggagatagagtctcacttgggggatgccagttctggcattcttcatagaaaatgggttccaccacgtttcccgagcttttgtttatatttacccaatgtcttttttttttttttttttttttttgagacggagtctcgccctgtctcccaggctggagtgcaatgatgcaatctcagctcactgcaacctctgcttcctgggttgaagcaaatcctctgcctcagcctcccgagtagctgggactataggcgcatgccgccacatccagctaatttttgtattttcagtagagacggggtttcaccatattggccaggatggtctcaatcttgtgacctcgtgatccacccgccttggcctcccaaagtgctgggattacaggtgtgagccaccgcgccaggcctatatttacccgatgtcttaataacaatcacgtatagataaaaacgattcaactgagaatctgaacagagctgactccttaggcagtgaacatacggctaaattaacaatcagcaggtttacagagattcctaatctcaagaccagcaaaatagggatcaagtgagactctgaaaacctgaaaagccaccatctcctgcctgttccctgcctgtgtgactctaaggacttggggaaggccctccttcccactctggacctccaggccctacacctccaacttggatcagaatctacactggggtggctgaggcacctccccaagagcttggggtggtcccggctatgaactggccccacgtgctgcctgcctgtgccttgttgtgaggatggaaggatgaggacaccagtcagcggcacccggcacggagctggcggcaaatgagcctccagcctgtgcttggaggcttcagcccacagtccctgcacttactggcctagagaccagggagaggaactgggagcttttttcagaaaaggaatgtttgttgtaagttgaaaactttttttttttttttgagacggagtctccctctgtcgcccaggctggggtgcagtgatgcaacgtcagctcactgcaacctccacctcccaggttcaagtgatcctcctccctcagcctcccaagtagctgctactacaggcaagtgccaccactcctggctaatttttgtatttttaatcgagacggggtttcaccatgttggccaggctggtctccaactctcgacctcaagtgatccacccacctgagcctccctaagtgctaggattacaggtgtgagccaccgtgccggctaaggtggaaaacttttagaaatctagctaaaagtcagggtcctgaatccactcagaggtagtcaaatctaccatggcagctgctcctgcccctttgtgaggaagggtgattaaagaaagaagaaatcccacactagaggcaaaagggctgcctggtggacttacacccttgaattcttcatctcctgagcggaagtcaccagctgcgtcatctgccagacacaaagaaaggaaaagtcagtccccggagaacggtcccatccggtttccgccctcccaagctcgccatccagggtgagtctgccctgaccacagtggggttgaaacatgccacctgcgagtgtccacgacacagatggggcaagcagagcccccagcaggcagccgacccatcctacatctgtctggcccacctggcccccaggacataccattttcggagaaatctccttcactgtcaacccgggccagtttggtgtctggctcctcgtaaagttggaactgcttccgtttcctgcccgtgccatctggtccgaagcggtcaaaccctctcctcttgggctacagacaacaagcacaccccatgagctacttacgagggccatgaagatgccccacagaaaagaacaaggaggttgtaggatcagacaacacaggcacaaaaggtcttttcaaaaagcaaagagacaacataatttgaaactaaaaagaaaatcatgctgagtgaaaagaagccaggaacaaaaggccacacgtttcgcgactccatttgtgcaaaatgtctagaacacacaaatccagagaccagtggtggttgtcgggggctggtgggggcggggaagagacaggggtgactaatgagaagaagtttctcttctggttgacataaatgctaagattagactgtgatggtggggatggttgcacaatcctgtaaattaactaaaagtcgaactgcgcacttaaaaacatttaagtgaatgttgagatggggaaattttacctcaataaagctgctaaaaagagaagcgaaggcggccggaaggaaccttgcgagggcttacccgatcccgatcccgcatccgaggctgcgagcggccacatccgtagggcatggtgctgtcatagccgcccgccccctgcatgcccatcacgccgtagtcgggagccatggactgggagaagagggacggaggtggccggctgggggagggccctcccaggccccgtccacccacgtagttcagctcgttccagggcgtggacaggggctcagaggacgcagcggggggcacgaaggggtcgctgcgcatgaaggtgccagggttgctccggtcctggaagcggccctggccccggccccgcatgaagccatcaagggagccccgctcccgggctgggtctcggcattcactgtactgccccccaaagctgccattgcggtcggaccccaggtcgaactcatagtcgtagctgtagctggggcggtaggggttgtgctccggcaggcagggcctggagtcataggactcgaacggctggaagcggaaggagctgcaacagaagcacagcccatcaggggcggtcaccccgatcacccactgccacactccctcagtataacctcgacgcccctacattcaaaacagcaaaccaaaccaccctgcatcccacctaagtgctgggatgaccaaaactgaccaacaccctccctggaacactgctgagcaggggacagagcccctggccacaggaatagcatgatgtagaaaaaaggagtctcggggagcttagccaacaaccacgcccaagccccgccatgaagaaaagcaaggaagtcctactgtaacatcactgaccccccacgagcccaactcgtcaatgccacacccaagagggaggcggggacaggccctccctcaagagtgggtgcccactcccatgcgcacaaaggtggggatgtgtggggtcccgggggagggcttgggtccataatcacctctcccggtcctgtatgccctccccaccgccgccgctcccgcccctgcctccttccttggacatcatgtccaaacgctggttgatcttggcaatgagggagtcggaattgtcggtgcatggctctgggccgtaagaggccatgtgcatggcaggggccccggccgccaggccgccatcattggccttggcggcctcccacgaggctgggccgtagctgtaggttgcgcctgtggtgacactggtgttctgggcgccatagtaattgtagttttcataacctgtcacagggggaggagccaagtcagacttcagcagccacgaggcctgtccatggtggacacaaccggggaggggcacccgctgccacggagaaggaaaacgggtgtgggacccagtgctgctggcatcacttcacactgcactgtgacctgccaagaggcagcaggaggtggccagagaaaggggcagcctcagtgccgagcggcgggttttccatgccagacgctaggacctgttccccattcaaagccgggtgactgagagcctgggaacagcagttccggctgctgacaggccccacaaaggaccgctgctcccaaagcacggtcgcagtcctccccatcatgctcccctgaggccgcccaccacagccctctgcagtccccccatatacacaacagcagccgtggctgactgcgtcctcaggaacagagccagaaagtccacgccagacctccctgacgggctgacccgcctggccttcagatcagaggcccacttgcccgcccacagaccccccccacagaagggcttaccttgccagctggccacaccagttccatatgcaccttaggggaaacagaaacacacaagagccctgtttgcagaacgaaggcactgacaccccagctgtcaccttgctccaccctccacagccccagggccagggcttccctccgcagcgctcagggagacacccttgggtgtttttagctcactcaactcctacagagcactaggctgagaggctgagcacaagcaagccctctatcccgggcaaggccaaccgtccgtcagggcaagggaagggacgccgcacgctccccaggaagctcgtccactgtgggctgctggccaagaggttggccaggccaggccccaggcagagacctcgtaaagggtcagttcccatcagaagccagagtgcaggcgctgccaactgcacagcgaagcattggtgcaaagtcacgtcctcaactcaagcgaaaaagaggacgttatgtgccacgagcgacttggaaggcctcctcctgaaacaccgggtggtggctcaaaagcagccccactccccatgttgcctgagtcagatctcaggctcagaaaacaaaggaagccctcgtgccctaaaacacgggctggcagaaaggagaaagcctcgccagcagagagcatgcactggttcgccacacaagcctagcatcatggccctgactctaaagcagggatctgcaaaaagtccagccacacccagcccacttcccgccttggcacagcccttaggattttcgaatttcggtgcccataaataagtaccagcacactgcccgtagccctgtgctctcaggctctgccctcagctaaggatgaattttacgtttttaaatggttggggtaaagtttctaaagtgtattcaatgacaaattttgacatgagatacatcacttacacactggatcaaaactcagagaactatacaaattaacaaaaactatgagctatagtgaataatatcacatcaacattgcctgattaattgtaacaaatgcatcacaccaatgcaagattttttttttgttttttttttttgagatggagtctcgctctgttgcatgggctgaagtgcagtggcgcgatctcggctcactgcaagctccacctcctgggttcacgccattctcctgtctcagcctccggagtagctgggactacaggcgcccgccaccgcgcccggctaattttttttgtatttttagtagagacggggtttcactgtgttagccaggatggtctcgatctcctgacctcgtgatctgcccgcctcggcctcccaaaatgctgggattacaggcgtgagccaccgtgcctggcctttttttttttgagacagggtcgtgctctgtcacccaggctggagtacagtggcataatcacagctcactgcagccttacctcctgggctcaagcaatcttcctatctcagccttctgagtggccgggactacaggcacgcactgccacgccccactaatttttcattagttggataaaaggatcacttgagctcgggtctcgaactcccaggctcaagtgagcctcttgcctcagcctcccaaagtgctgggattgcaggcgtgtgctgcctcgcccagctaatgaaagatcttactaatgaggccaggcgtggtggctcacgcctgtaatcccagcactttgattatgggattgattatgaggtcaggagttcgagaccagcttggccaacatggtaaaaccctgtctctactaaaaatacaaaaattagctgggcgcagtggtgggtgcctgtaatcccagctactcgggaggctgcggctgcagtaagccgagatcacaccactgcactccagcctgggcaacagagcaagactctgtatcaaaagaaaaaaaaatcatactaatgagatttttagtacactcactacaggtgtagtgtacactcagtacacctgagtggaggtgggtgggcgtatgaaactccactactcaatctaaagctgtactaaaaagtctggtaattatagagaaaaaacacctcggatataccctcagctatttactcagaataacaaaaatattttgccaaaatagagtattcactaacacgcaaaaattaggaacttcaaattgtattgtctgtaagtaactactggcattgtcccatccactctttcacacatttatgactgctttcctgctacagagactgtggagcccataaagccacaaagatattcactatctgatcttttacacaaagtttgctgacccctgggctactactctcccttgacccaagttcagctctgccatgctagggccttgagttaggggaagcccacgcctcacccgcaaagcagagcccacttaccctgggtgttggcaggtccagcactccacgccccgtagcctgcaagaagaccccgtgagttaaaattctatttgtcacaccagagaacgggtccttttgggggtactcctaaagggatctccttacagttcagtgccagccttagaagaaggaagactcccccccaccccaccaaaaaaaagccatcacacaactggctaatggcgtcatcgcattccacctggctgagatcaaagcagaaaaagaagggtgggaagtgggcttggaagtcagctccgccctgcagagggaccttggccaaggacctcacctctccaagatttcatccacaactgaggctaacacaagacaatccactcagcatgaggacacgttcccccacccaccacacagctaggaaaccagttcagagtgccatcacaagtacttcgtaactgaaaacaagcatgggaatttagtgacataaattgcatctttctaagctgcacttcctgccactttttgtttttttgaggcggggtcttgctctgttgcccaggttagagcgcagtgccgcgatctcggctcactgcaagctccgcctcctgggttcacgccattctcctgcctcagcctcccgagtagctgggactacaggcgcctgccaccacgcccgcctaattttttgtgtttttagtagagacggggtttcaccatgttagccaggatggtctcgatctcctgacctcgtgatccgccagcctcggcctcccaaagtgctgggattacaggcgtgagtcaccgcgccaggcccttcctgccacttttaaggcctccacggatcccctggacctttaagtcccagagccttcgcctggccctaaggcatcagacagcactcttcacccctccacaccccccgcccactatggcatctgtctggtccctccaggaaggagaatgggaactgtgttctctttatttctgtgtccctggggcccagcactgagctgcgcgcgggtggccaccatgcctgttaaatgacttcactttgatgaggcaggaacatatccatgtctccctcaccagaacaactcccccgcccccggctaagtgcctagtgcgtgccgatacaccgcaagcacccagcaaaccctgttgtccggaatgccattcagagacaagggagctaggctcatgggttacgagacttgacccagtcatactgctgagttttgccctctgctatgctacgccttcccctccgtcataccgcaaaaccttctaaattcgcatccgtgcagcagaaaggcagactgcagattccaacagcaagtaaccaacctcgagagactgcttctctgtgaagctctagtgtaagtggcacgcactattaaccttaaaacgctcccggaaacacaagaaatcagggaagcttaactatctccagtgtgtctgaaaggttttcggcaggtaggaagagggggtaaaaaaaacctctccaaactaagaatgaaaagaaggaatacaatacctgcagaaaagatctgatgggaaagaagggaaagaatggtgaaatctacccaggctgcggaagaccaggagagccaggctgagccttcgctaggacccggaagacaccaaagcacaccgcgcacgctgccgcctcaggaccgaaacctctctctgcaatttctggtgctgggatacttttgccctgccacttctcaagatcgacaacttctcgagctcctgcagccaggatcagaccactagcttctctacaaccagtcgagctccacccagcatgtcccaactatcccctgtgggcaaactttgctcccaaaaggctctgattccagaagcagggagcaggcagctcgagaagatcggccctactgcaggccaagcgctaaatcctagtggggaaaggacacgttccctcctgcacagcccctcggcccctccaggccaccacaacagactgcctaaaggagaactgccaatgtcaccagccccagggcacatcaggtttccagctttatacgaacactcagcatctgcccctcaccatcctgtcccaagccagcacgcgccgggtacagagctggagcccggcgaggctgactctcgcgccggcagcactcggccccaccgcgctgcaccggggactaaaggcccgaccccgcgcagcccgacggcttccgggacaggcgccctgggccacgtgagcccagcggagaccctacacggccccgcgggcctagggcaggtcgggagagaggcggcccccgcggtccgcccgcggccccagacccagctccccgggtccgacctcacaaccccacgctgtagctccgcccccctagcgccgccattttgtggcgtcttcggaagaggaagccgggagtgcaaaccccggggtcgctgggggccggaaggactccgccgaaggtgaggggcaaaaacggcccacactgtctaagacgcccccacgaagcccaccgcggcgtctgccccaaccccgagtcccgcccgcctcctcggggcctggcggccaatccgcacgcagagccccgggagcgacggcgccaaagcccaatgagcggcgcgcgcgcgccctggccgcctctccggagggcccagctggggcaaccacgctcgggacgaaggcccggccggcggcagtctgcgcagcggctgcgtcgcccgcacagagccttccctccccgctccgcacccagcagccaacacaaacctccgtagccctggtccatgtcttcgacgcggcccaccagcagccccgtttactaggcgaccacagcacgcatgcgttcagcgcacctccgccatcgactactggaagaccaggcgcacacgtcactacttccgcgcgcccccattggctggtcttcacgagggcccgccctcgccgtcccagctggcctttcgggctgctacgatccagctccgtggcctaatgggagttgtggtcccaccgcggtgcccgacggcccggcccgcgcgcatgcgcaccccgcccctctgcccaccccgccccgcccgcgcggcacagtaacagagaaacccggaggtgggatgggaaaactttattaggtttggtttccagcttcggccacgcgggctccgcccgccccgagctcgggtcacggggcgcccccgccgccctcctcgtcgtcctccacgtcgaggcccgggatgccgcggatctggcgttgcagcgcccctcccagcaagggcacggcgccctcctcctcctcctctgggggcggcggcggtggcggcgacacggccccgggggctggctctgggggcacgggaggctgcgccggcacgccctctgcgccctccgagatccctgccgcttcgccctgcgccccctcgtccagggcaccgccctcagcctcctcctgctccttctcctcctcggggctgtcggtgaaagggttctcgccctgtggggaggggcgcggacactgaagggagggagcacaggcggggactaagctggggacagggcaggcccggaccagtgcctcaccttcaggtagcgctccagcttcttgctgatgagcttgttgttgagaatactgcgggccaccatgagggaggacttcttggactgctccatcatgagctgcgggcagggcagaaggagctggagaggctgctctgagtgccctacaagttgctgccccgaccctgccagcttagagggaccccaccccgcccctgcacccacgcacttccagccccaccaacggagggccactccacaagcatggaaccacaacctatctgatctttgttcaaattccctctccttccacaccacacttactgtaggtaaataaaaatacagatctatatatctctaactttacggctgtattacagaaatctgatttgcttacaaaaaagctataagcagtgaacaattaagaaactaagagccaaaggtgggtgcaacctgtaacaaggtgccaactaggctaataggcaaggagcactttggggccaacggggaagatataaaaacaggaacagatatttaatgaaacgtcttttttaacccacagaattccaagaatgaagaattattcccagtcatgcaagggtgaagagagtcttctctgctggtgggaggatcaactgtttccgtattttttggaaagcagtttgacacaatgtatgaaaagtaaaaatctgtctcattaatcccttcccagaacgtatcctaaatttaagaactggaaacatgcgtgcacactgattgtagtggtgaaaaatgggaaaacacctaaacgttcctcagtgcagaagaggttaaataaatcgtacattcaaaagaacatcatgcagcccttcaaatcgggctcatctctgcactggcataagaaaggtgtataatatagtactgtctgcagagcatgccagagccattttgtctggaaggatttccatcaatatgctgggccatctcatggtgggagtacaggcaaatctcactttgatcattataaaaaccataaggtaaaagaaggatatttttggtggggtgggagagcccattgagtccttcccactccatttacatgtttcagaaagccttctcacttgctgtttctactctctccatcttcatttttttttttccttagcacgttttctctactactggaggaaaatattaacagacatcatacatgctcacaataaactaaagatacacaattaggatactactatagaccgttcccccagtgactctcacttgccaacagtttatcctcctggttctagatgcccagataaccacaccataaattctcccaagtgaggcacatttatgttgcttccagatcttctccacaataacccagcaacactagaataaacttgtacacttccatgctggtgcttttcattctaaccaggtttggtttcaaagtgatagtgcccaattaactgcagaacatttgcaagtcatgcttcttccacctgtgttaaaacaatgacctggtcctcctgcctgcccatcagcactggatgttgtcactgttgggtatttttgctgtggataaaagacagaagaatctgtgctgctgcctcccacggcatttccctgcccaccggcgagtgagtgctctggtaagcacactggaacacccgcccacagtttataattttctaactattttctgatcttggttttcatttttcacatttaaattttttttttttttttttaagacagtctcgctctgtcgcccaggctggagtgcaggggctctcagttcactgcaacctccgcctcccaggtttaggcaattctcatgcctcagcctcctgagtagctaggactacgggcacgcaccaccacacccagctacttttttgtatttttagtagatacagggttttcctatgttgcccagactggtcttgagctcctgagctcaggacctccacccatctcggcttcccaaagtgctgtgattacaggcgtgagccaccacgcccagccaaattttctagaatttgatacagattgagtatcccttattcaaagtgcttatgaccagaagtctttcagattttgatttgcattatacttaccagttgagcatccctactccaaaaacccaaaatctgaaatgcttcaatgagcatttactttgtcatgtctgtgctgaaaaagtcagattttactgggcacagtgtctcgtgcctgtagtctcagctactctcatgaggctgatgcaggaggattgctcaagttcaggagttcaaggctatagtgtgcaatgatttcacttgcgaccagccactgcactccatcctgcacaacatggcaagactcaattcttttttcttaaagaaaaaggttttggatttcggagcatttcggattttcagatgacggatgaactcaatctgtatatgttatgaggtagagggtccaaaattttcttttccagaaatgtacaaaacacaccatttatttccctaccaaattggcatataggtctaccatcccttatctataaactggaaatccaaaaggctctagaaaacaagtcttcccccaaaattcatttggtggctaaatgtgaactgacattacatttttcatttatatgtaagtcatgtgaagaattatttgtgactcaactacaaggcgctttccccagatcctgttggagaggttagtgctaataccatattgtctttctttttattttattttagagataggagtctcactctgttgcccaggctgcactgccattgtgtgatcacggctcactgcagcctcaaactcctgggctcaagtgatcttcccatgctagcctcttgagtagctgggactataggcactcaccaccatgcttggctaattttttattttttgtagagacgagatctcactatggtcaggaactcctgggctcaagcaatcccacctaagcctcccaaagtgctgggattgcaggtgtgagccactgcccccagccttgcatattggttttctgaagctgaaaaattaattctgaggcttctggccctaaggtttcagataaaatatctgtactaactttaacaaattactaagtctgaaatatactgagatcttttgctagactctctattctggttccactgtttcattactgtgctaattatcactttttttgttttttaattgcagcagctttgtagtaagttttagtatttctgaaatcaatctctcagctattgttagactgaattttacaatgtaaaactttaaaataatttcatttcattcagtcctactccccgactgatatttttgactagaaatgtgctgtctatattaatttggagagaactggtttttgttttgtttcactattaaattgcctatttaagaacacagaacattcctccattcattaaggtctatttctttttttttttttttttttttttgagatggagtcttgctctgttgctcaggctgaaatgcagtggcatgatctcagctcactgcaacctccacctccaaggttcaagcaattctctgcttcagcctcccaagtagctgagattataggcacccaccaccccacccggctaattttttgtatttttagtagagacagggtttcaccatcttggccaggctggtcttgaactcctgacctagtgattcacctgcctccgcctcccaaagtgctgggattataggcgtgagccaccgtgcccggctaaggtcttatttcatatccttggagtatttgcagttcttaaaagatctcaagcctttcttcttccctccctgttttttttttttttgagacggagttttgctcttgttgcccaggctggagtgcaatggcgcgatcttggctcactgcaacctccgcctcccaggttcaagcgattctcctgcctcagccccctgagtagctgagattacaggcgcccaccaccacgcccagctaattttttgtattttagtagagacagggtttcattatgttggccaggctggtctcaaactcctgacctcaggcaatccacccgcctcagcctccccaaagtgctgggattacaggcatgagccaccatgcctggccctcaagtctttcttcttaaatctgtattcttagctatttcatacattgtgtggttattttaagtagttttttttccatttaaatttctaactggttaatactagaatagagaaacactacgactttttgtacgctattttgaatcccatccccttaccaaattctattaattctaagaacattttgctgggatcattcagcttttctaagagcataatcacattatttgcacataaagagagtttgcattataccaataatattgctagattttttgtttttgtttttgagacggagtctcgctttgtcgcccaggctggagtgcagtggcgcgatatcagctcactgcgagctccgcctcccaggttcatgccattctctttttttttttttttgagacggagtctcgctctgttgcccaggctggagtgcagtggcgggatctcggctcactgcaagctccgcctcccgagttcacgccattctcctgcctcagcctcccaagtagctgggactacaggcgcccaccaccacgcccggctaattttttgtgtttttagtagagacggggtttcaccgttttagccgggatggtctcgatctcctgacctcgtgatccgcccgcctcggcctcccaaagtgctgggactacaggcgtgagccaccgcgcccggcctttcatgccattctcttgcctcagcctcccgagtagctgggactacaggcgcccgccaccacgtctggctaattttttgtatttttagtagagatggggtttcaccgtgttagccaggatggtctcgatctcctgacctcgtgatccacccacctcggcctcccaaagtgctgggattacaggcatgagccaccgcgcccggcaactgttgctagatttcttagggaaccatccctccattccagaaacaaaccttacttataatgtatcatacatagggatcactactagattgatagttactaatattttatttagcacttcattttatttatttttttgagacagagtcttgctctgttgccccggctggaatgcagtggcacgatcacagctcattgcagcctcaacctcctgggctcaggtgatcctcccacctcagcctcccaagtagctgggaccacaggccccagtacctggctaatttttttatttttaattttatagacacagtgtctcactatattgcccaggctggtcttgaactcctgggctcaaatgatcctcccacctcagtctccccaagtgctgggattacaggtataagccactatatccagccaactttctttcttttttttctttttttttttttgaggagtctcactctgttgcccaggctggagtgcagtggcgcgatctcggctcactgcaacctccgcctcctgggttcacaccattctcctgcctcagcctctcgagtagctgggactacaggcgcccgtcactacgcccggctaattttttgtatttttagtagagatggggtttcaccgtgttagccaggatggtcttgatctcctgacctcgtgatccgcctgcctcggcctcccaaagtgctgggattacaggcatgagccaccgcgcccggccaatccagcccactttcatatctttaataatagtaaactaatctacagtttcattttggtatcatctttatcagaattttggaattaaggtttaagaagcttcctaaatattgagaggacagactctagcatagcagtctgaggcgttccctggaacactccctagtgaaactgatgaaaagtattaaaaaacaaccatttaaagtctctgaaaatgttcctaaggacatacagccctatgagaaagatttaatgaggaaaagctactaaaactcagttccatgaagagttgtgatgtctgaaacacaacctattgcatccctgcctcccccagcttagtgtgatggaaactccactccagacagtacagccaagaagacaggtctgcccgcatctacccagatcatctcagttaaggggtatgatatcttcccaggaggaacagaatgtcagcatctatttttctgagttggagtttcactcttggttgcccaggctggagtgcaatggcgtgatatcggctcactgcaacctctacttcccgggttcaaacaattctcctgcctcagccttccgagtagctgggattacaagtgcccgccaccaagcccggctaatttttgtatttttagtaaagatggggtttcacgatgttgtccaggctggtcttgaactcctgacctcaggtgatctgcccaccttggcctcccaaagtgctgggattacaggcgtgagccactgtacccagccggatgtcagtatctctcatcccgcccccagctacctgctgatgaggctaagttctagacaagcatagctgagagagaacggttcctatcttctacccagccacacgcacgtggaatggaggcttgaccctgggcatggcacactaagaatataagggctcacatacccatggcttgttcataaagcagaggtcccatgccaggaaaggcaaaccaagaccggaggctacagcctactgtacctcctcccatgtctctcctaaagtggcagagtcactcagagagaggtactccattgtctccatccccagagccttggctcagagattctgcccacagtgagagcacggccttaaatcagtaaactcccaatctcaaaggaactgactgacttcactggcaagagtgttgggaagtgcaagactagggcctctctcaaaaacaatggagactagggaggaaaaaaattaaaaggacattgatagcttttttttttctttctgaatatttattggagttaaacactgatagctttgtccttttttttttcccccaccacacagccataaaaaagaaggaccggtagatttgacagtgatattagctaacccataggctaactaggttaccaaagaggacaaggaccagtgaaatagctaagaacagactccctgggttcagaataaatctcaaacaaccacctcaaaaaccatccctcttgggcctggcatagtggctgacgcctgtaatcccagcaccttgtgaggctgaggtgggtggctcataagatcaagagttcgagaccagcctggccaacatggtgaaaccccgtctctactaacaatacaaaaattagccgggcgtggtagcacatgcctgtaatcccagctactcgggaggctgaggcaggagaattgcttgaacctgagaggtggaggttgcagcaagccaagatcgcgccactgcattccagcctgggcaacagagcaagactcttgtctgggagagggggcggggaggggaggggaaaaaaatccctataaaggagcccaaatttaattggatcagattgggcagcaatctatgccccaaaacattgttgaaaacaataaagcaatcagccagcaattggtagagtttaacagctgagtatggtctgggaaaaagagcgagcccatggcttcctccctccaagacacaccaccagtttcatactgtgtgagaatgaaagagacctaactaaaaaaatctagcaagtcactaaacaaatagacaagcaaatacagtaacaagaccctgggagggtgggtgggggatcagtgcccagagttgccacaacaaattatctaagatgtctagttaacagtgaaaaattatgagacatccaaaggaaactctgacccaggcacagatgaaaaagcagacaatagaaacttcctgtgacagtgaacagatgtcaaattcaacaaacattttaaagtagcaattgtaaataggtttaaagaaaactcaagtagaagaaggtataatgacactgtctcatgaaacaatttaaacacagagatagaaatgataataataaaatggtaaatcttagagctgaaaagtacaataacggacaccaaaaatccatttgaaggactcaacagatttgaacttaagaattagtgaacttgggccgggtgcggtggctcacgcctgtaatcccagcactttgggaggccgaggcgggcagatcatgaggtcaggagatcgagaccatcctggctaacatggtgaaaccccgtctctactaaaaatacaaaaaaattagccgggcgtggtggcgggcgcctgtagtcccagctactccggaggctgaggcaggagaatggcatgaacctgggaggcggagcttgcagtgagccgagatcgcgccactgcactccagcctgggcgacagagctagactccatctctaaaaaagagtgaacttggccgagctcggtggctcacgcctataatcccagcacttagggaggccgaggcaggcggatcacaaggtcaagagatggagaccatcttggctaacacggtgaaaccccatctctactaaaaaaaaaaaaaaatacaaaaaattagccgggcgtggtggtgggcgcctatagtccccagctacttgggaggctgaggcaggagaatggcatgaacccaggaggcggagcttgcagtgtgcagagatggcgccactgcactccagcctaggcaacagagcgagactccatcacaaaaaaaaaagaaaaaaaaaaaaaaagaattagtgaacttgtgtatcaaaagagattatacaatctgcagaacagagggaaaaaaatgaggtaaaatgaacagtctcagacaaccatggcacactattaagtgatccaacatacgggtaatgagcattagaagaggaaagagagaaaggagtaggaaaacaaaatacttgaagaaacaatggctgaaagctttggaaggttgatgaaacctgtaatctatacatcaaagcagctcaggccgggcgtggtggctcacgcctgtaatcccagcactttgggaggccgaggcgggcagatcacgaggtcaggagatcgagaccatcctggccaagatggtgaaaccccatctctactaaaatacaaaaaattagccgggcatggtggtgtgcacctgtaatcccagctactcagaaggtagaggcaggggaatcacttgaacctgggaggcggaggttgcagtgagctgagattgtgccattgcactccagcctggccacagaccaagactccgtctcaagaaacaaaaaaccagcccaacaaactccacgtagaataaacacagagagatgcacaaagacataatgaaggtgccaagagtcaaagacaggggaaaaatcttgaaagcagcaagacaaaacaaatcatcacaaggaaaccccaatattaggttaaagccgacttctcagcggggcacggtggctcatgcctgtagtggcaagaccctgtctctatttatttttttttaatcaaaaaagggaactctgtagacagacacaaattactaaaaatgacttaaaaaaaaaccccagactatctgaatataccctataacaagtggagactgaattattaataataataaaaaaaaactagttaacaggctgggcacagtggctcatgcctataatcccagcactttgggaggccaaggcaggcagatcgcttgagtccagaaatttgataccagcctgggtaacatgacaaaaccccgtctctacaaaaaactaccaaaactagccgggcatgatgtcacacatgcctttagtccctgctatttgggaggctgaggtgtgaggatcgcctgagcctgagaggtggaggttgcagtgagccgagatcacaccgttgcactccagcctaggcgacagagtgagaccctgtctcaaaaaaaaaaaaaaaaaaaatctagttaacaaaagccaggcctagatggcttcataagcaaattctacgaagcacttgaagaattaatactagtatatactagttcttcacaaactcttccaagaaaccagaaaaggaagaaaaatgacaactgtatgaggccagtattaattaacctgatacccaaaccagacaaatatatcaccaaaacactacagactattatcttttatgaatatagatgcaaaaattctcaacaaaatagcagcaaaaccaatctaatatataaacataattacacactatgaccaagcaggatatatcccagggacacaagggtgttttatatccaaataaaataatctaacatactgtaacaacacaattaaagacaaaagccacatgatcacctcaacagaggcagaaaaagcatttgacaaagtccaacaccattttaagataaaacacttaacaggactagaagggaacgtcttcaactcaatcaagggcacctatgaaaaacccacagctgacatcacacttaatggtaaagactggtgctttccctgtaagatcagaaagatgaggacatccattctcaccacttctattcaatactgtattggaggttctaaccagggcaattaggtaagaaaaagaaataaagtgcatctagattggaaaggagaagtaaaactaactctatttgcagatgactgatgttgtacaaagaaacccctaagaaatccactaaaaactaggttgggcacggtggctcatgcctgtaatcccagcactttgggaggccgaggcgggtggatcatgagcaggagattgagaccatcctagctaacatggtgaaaccccatctctactaaaaatacaaaaaattagctgcgcgtggtggcgggcacctgtagtcccagctacttgggaggctgaggcaggagaatggcgtgaacctgggaggtggaggttgcagtgagccgagattgcaccactgcactccagccagggcgacagagtgagactctgtctcaaaaaaaaaaaaaaaaaaaaaaaatccactaaaaactattagaactaataaacattattttatgtttttatttttattttattttatttatttattttttgagatggaatctcgctgtgtctcccaggcacagtgcagtggtgcgatctcagctcactgcaacctccgcctcccgggttcacgccattctcctgcctcagcctcccaagtagctgggactacaggtgcccgccaccacacctggctaattttttgtatttttagtagagacggggtttcaccatgttagccaggatggtctggatctcctgacctcgtgatctcccgcctcagcctcccaaagtgttgggattacaggcatgagccactgcgcccagccttatgtttttattttttagagacagggtcttgctctgtcactcatgctggagtgcatggtaggatcatagctcactgcaacctcaacctcataggctcaagccatcctcttacctcagcctcctgcgtagcggggactacaggcacttgccgccacacctggctaacttgtttcttttatacagacagggtctcactatgttgcccatgctggtctcaaactcttggactgaagcaatcctcccaccttcacctcctaaagtgtttggattacaggtatgagctataatgcctagccatagctgaaatattattaaaattatgaaatattaaaaacaaatagttcagtgaggttgtagggtataatatcaatatattggctgagcacagtggctcatgcctataatcccagcactttgggaagctgaggcaggaggactgcttgagcccaggagtttgagaccagcctgggcaacatggtgaaaccctgtctctacaaaaaatacaaaaattagctgggcatagtggcacatgcctgtagtcccagctacttgggaggctgaggtgggaggattacctgagcccaggaggttggaggctgtagtgagtcatgatggtgccactgcactccagcctaggcaacagagtgagaccctatttcaagaataaaaaaaaaaagtatttttatacacatgcaaaaaaaatccaaaaatatcaagaaaacaattccattcataatagtaacagaaagaataaaatacttataaataatcttaacaggccgggcctggtggctcatgcctgtaatcccagcactttgggaggctgaggtgggtggatcccccaaggtcaggagttcaagaccagcctcgccaacatggtgaaaccctgtctaccaaaaatacaaaaaattagctgggcgtggtggtgcgtgcctgtaatcccagctactcaggaggctgagacaggagaattgcctgaacccaggaggcggaggttgcagtgagccaagatggcaccactgcattccagcctgggcaacaagagcaaaactctgtctcaaaaaaaaaaaaatcttaacaataaagaacaaagcttacaccctgaaaactacaaaacctttgaaagaaattaattcatttactagatctcagtaaatgaaaagacatcccatattcatggattagaagacttaatagctatggtcaactgactttcaacaaagatgccaagatcattcaatggggggaaaacagtctctttcatttctttttcaaatggtgccggaacaacttaatatctagatgcaaaaaataaagttagaaccttacctcatacgatataaataaattaactcaaatggaacaaagacctaactgcaaaagctaaaaccataaaattcttagaagaaaacacaggggtaaatcttcgtgaccttggatttatcaatagattcttagttatgacacccaaagcataagcaataaaagaaaattggactttataaaaattaaaactattgtgctacaaaggacacatcaagaaggtgaaaaaacccacagaatgggtgaaaatatttgtaactcatatcaaatatgggactttacaaaaagaactctacaaaagacaacacaattaaaaaatgcacaaagaacttgaatagacatttctccaaagatacaaaaatggccaaccagcccatgaaaagatgccattagtcagttatcagggctacgcaaatcaaaaccacaatgagatactacttcccacccactaggatgactagatcaaaaagtcagaaaatgccgggcgcggtggctcatgcctgtaatcccaccactttaggaggccaagacagggggatcacctgaggtcgggagttcgcgatcagactgaccaacatggagaaaccccgtctctactaaaaatacaaaattagccaggcgtggtggcacatgcctgtaatcccagctaggagaattgcttggacccgggaggcagaggttgtggtgagccgagatcgcgccattgcactccagcctgggcaagaagagcgaatctctgtctcaaaaaaaaaaaaaaaaaaaagtcagaaactaagtgttggtgagtatgtgaagaaatcaggacccttatatgttgctggtggaaatgtaaaatggtgcacagtcactttggaaaatagtctcacaagttaaagtgttattatttgatcaagacattccagtcctagtcatatactcaagaaaaatgaaaacatatgtccacataaaaacttgcacaataatgtttctaagagcattattcataatagccaaaaggtgaaaacaacccaaacacccaaaaagataaataaacaaaatgtgccacatctatctacacaatggaataatatgaagccatatgaaggaatgaagttctgatacatgctacaatgtggctggaccccaaaaacatcatgcttagtgaaagaagccaatcacagaagaccacatattatgtgattctgtttatatgaagtgtctagaataagcaaatagagagagatagattagtagctgcctaaggctggaggaggacaagaggttgggggggctgatagctaaagggtttctttttaaggtgatgaaaatattctgtaatcgactggttgatgactgcagaattctgtgaatacgtgaaaaaccaatgaattggttttttttttcatttgtttggtttttttagagacagggtcttgctctgttgcccagtctggactgtggtggtgcaatcataacttactgtaaccttgaactcctagcctcaagcgatcctcccaccttggcttcccaaagtgctgggattgcaggcatgagccaccacgcccagcccaaagactactgaattgtatactttaaatgcgtgaattgtacagtatgtgattctatctcagtaaagctgttaccaaagataacaataattagaagctttccattaatctctacagtctagaattctaaaaaatacagtatttagactgtattcaaattatctctgtaaaccaatgacttctggtgccttctaaatatctttcatcatccttccaaacctctctacggttaccagctgctatggcttgttcttttttttttttttaacttcttttaggatcaagtttgagtttatattttgctatcacctctcccgtattttccaacttttttttttttgagacagagtctcgctctgtcgcccaggctgaagtgcagtggcacgatcttggcttactgcaagctctgcctcctgggttcacgccattctcccacctcagcctcctgagtagctgggactacatgcacctgccaccacgcctggctaattttgtttttgtatttttagtagagacgggtttcaccatgttagccaggatggtctcaatctcctgacctcgtgatccgcccaccttgtcctcccaaagtgccgtgcccattgttttggtttttttgttttgttttgttttgtttttgagatgagtctcgcagattgctctgcgagtggcgcaatctcggctcactgccacctctgcctcctgggttcaagcgattcttctgccttggcctcccgagtagctgggattacagtgcccgccatcacgcccagctaatttttgtatttttagtacagacagcgtttcaccacgttggccaggaaggtctccatctcttgacctcgtcatctgcccaccttagcctcccaaagtgctgggattacacgcgtgagccaccacgcccagccagattttccaactttcattaatgacatatagtttccaccctctgcagtcttctaacccctactagttcctagcataagaatctgtttttaggccgggcgcggtggctcacgcctgtaatcccagcactttgggaggccgaggcgggcggatcacgaggtcaggagatcgagaccatcctggctaacacggtgaaaccccgtctctactaaaaatacaaaaaattagccgggcgtggtagcgggcgcctgtagtcccagctactcgggaggctgaggcaggagaatggcgtgaacccgggaggcggagcttgcagtgagccgagatcgcgccactgcactccagcctgggcgacagagcgagactccgtctcaaaaaaaaaaaaaaaaaaagaatctgtttttggcaagttccctaaagcttctctgttgccaaagccaactgacattttccttttcttcccagaactcttggtggcatttcccaatcctgagtctctgcaaccagagagacccctgaccctgtccaccgttcagaatcatcacaccgaaaaagaccagagaggaattgtgatgagcatggaagaagatggagaaatgctgcttcccatgctcaccttggatgcgaacatctgttcataaaccccaccaccctcctccagggtgaagacagccaagcccctctttggcccagacctggtcctgggcctctttgctctctgcccatacacagccccttcacccccacctgcaacacagcatgtcatccattcaatcaaaaaaacacctactctggcttccatgctaggcactggagcaacactggaaaatgagacagaatttgctcattctcttgccttatgttctccatgccgcacaacacacttccctactgctccctgctccctgacaatcttggcagcaccgctgtcctcccagttccccaagtcagaaaccagagtcaccccaggcttctgatcactcccacatgccagcccccggctcccttccttcaactgctcttctccccttcactcccaaggtggggtctcctcttgtctggagactgcaggagctcctccttggcccccaccaccccacccaggtgcaggcctgaagtctctagttcaacaccaactctaacctgttaatcccacacttgaaacttaactgcctacaggaacaagcccaggcctctcagtgcagctctcctgagcctcaagcccaaccccctcctccagcaacacttgcactgtatcatctccatttggtttctgaacctaatctggcgctggcccctatgaacatggaggtccccatatcccacagaatatatcaccttctcccaggcagagtccccatctctcacccctctctctgtagctgtgctgcctgcactgagctggaaatgtccatatccacctcctcctgcctccactgcagtccctcacgggctggcagaggttccaactgcacaacctccccagaggcctcactcaatctacccacaggacagagggagagcactgtggccactcaccctgcggttccggttgtgatccatggtcttcagatgcttctggatgatcccaaactgcatgggaatgaagaggtcgcaggctgcacaatgggctgcctccaccttcttcacaaaatgctccatggcaatttctgtagtggggaggagggagtcaccactgggcccaggtgcctaagatagacccaggtgttcgagaaaaaaaccacaccagctcctcctcaactcgccctgccacttccacctgggcctgagccaaggctggtctcctgaccttccctgggggaacagaagggtgtcctgaccctgcaccgaaaatcaggagtgcaggctgaggccttgcctggtgggagtgggctgaaaatctcctcaccctgggtcagatcctggtctctgtagatttgctggatgaggccatcaaggtcctccacggtttttcggagctcctctgtcttcttggtcttgttagtgacgtactcctgcaaggaatataaaggttcatgtgggccgccttatgttctcaggggtccaagaaactaagagcggctgtgttactccaaggctcacctgcagaaagtcagccgtctgcttagggagcttggtgcctacgtacttaaagtgttccttgtggaacttgctgtcaagatggctggccatctcgtcctcatagaaggtccggtatttgcacagagaacacacaaactggatcctgccacaggaaggaaacgaggggctgaggctgcaagtgtcccaggggatagtgctgccgcctcacccaacccagacacaagccctgaaacaggccttgctcacgggcctctgaagtacggtcccagcagagggacaggctgggaccagtggggtcgggagtagaaagggccagaaagtctgcaggctgcagttactgcaacgtaggggacaggggaggagctcttccttcccacaggcaggaggctgaagcctgagacagcagctgctgcaacaggcaacgagtcgctggaaagttgctggagggcctcgctaccaaggctgggcaggagcgtgtgcacttggcccaggtggggaccggaaggaaggatgccctggcgtgagccaggtggccctgaggtgcagagtggagtacgcagtcccgaggcagggcccgaaaaggtgctgcatcttccttctgggatctgggggactcaaaggcccagcccatcctctgctcagaatgcttgggggtggtgtcgggagggatgggaggcagcaggcctgggcacctgctgcctcatcttcctcttccaagaagagaccagtctgagctggaaggagggcgcccgctcggcctgccagagggcagcctggagtcacctgggcgaggtgctctgtctgggcctggtgtccacagtagaagcccggggtctggggcctgggccggagcaggccgccgtggcaaggggcggaggaggccagccgccaccgagacctcggggcgggtccctacctctgccggacgtccttatctgggccacggggtcagctttgtctggagagcccaggggccgggcgccggcgaggctgaggaaggtccagcaagagcaagagtctgaggcggaggaggcaagcgccagtgcgggagccctgagggcagacagacccgaccaaggggcgtgaagggctcagccgcagacaggcccggcctgacagggccggcgggcagggcagaaggcaggcccgaggctgccacagcccacaggtgctgccatctctcctgggcacggcggtggcctcttggcagctagctggggcggcacaggcgccttggaccttgagtctctgatgagctggccccctccctcaggggcatcaggcccccagtgcaccttggggttcgtgcgccgagtgacctagcgccagagcttctgagcaacggtgccgagcggtgtcaggtctcggcccacagacgccagcggtcgccaggcggccgcagaggggcaggggatgagtcaggccttgggagctgggcctggcgggaagcagggtccatgcacggccgagcaggtggcggctcccaagggaggccagagggcggcgagctggcagagctatggccctgctctcctggcggcagccccacagcgaggcagaggcagaggggtggagggaagctggttacctttccaccatgcggtctcgctgccgctttttctgcttgtcctgactcttcttgcctgcctgcaacttgcgcttggtctggccattttcatcctgggtggttagggcccctgtgggagcagatgggcactgtcaccaatttggctctgccaggacagggcaggccctgcggcctctggctgaatcacccactgtccactccagagggtccatcgagaatagctgtccaagcaaggcctctggccatgagcagggctgggtatcctgggctgtgcagggagtgggtttggcctaggccccaaggagtgggggccaggcgatgacccctccactctccaggacacccatgctctctgtgcagtgggccaggaggaggctggaaagcaaagagggggtatctttgtggggacactggcacatgttcagaggggccaggtggtgggatgcagggaggctgctcacatggccctgcccacccccaaccgggcaccgcggcaacagtgggctgacgctggatttgctgttaggtacctgctggcgctcatcactcaggtggggggacacggaatcccaacaggggctggagaggtgctaagggagaggatacgcacaccagagccgtaaaaactgcaccgagggtcccagatcggacaccagccactgaggacttggaactgcgcgttactgagggaccgagggcagggggcgtgcctggggttccccacacttttactagctgcccccatctgaaggcaaaaccagtgtgctaggcaggggtcaccaccatccacagcctccgcctgggaaggaggaggaagagtgggaagggggtggaggcggcgaaaagaaagccccctgccagcacacactcgggcccacaagggaggtccccaactggccgcatgtctgccgcaaccctgccctcagctgggtccctcccactgtgagcccctggaagagccgccctagcaccaggcaccccaggaaaactcacccttctctggatcctctttgccttcttctctcccatcctcttttccctcctcatcctctccgtcctaacaatttcaaattccaactttaaaacaggtgcctttttttttttttttaaaagaaaccaagtttattagagcaacggtatatagtaaaacagctgcttgctccatagacagagcagggctatcctataggcagggtggcccagagtagcccagttatttacaatggctttaaatgacaaggcccggctatgtgccagaaacctcacatcctcccactacctggtgcacaggggctcatcccattttccaacaaggaaactgtgcctccagctaggcagcctgtgctttctgccagaccacactgcctccccatgctggtcaccatgcacgcagagctgacacagcattgcctctggcccccagggagagcaccactctttaggccagctcgccctgcctgcagacagaaaatgcccagccagagccacttaccactctggagcccttctccacagcctcggtgccttcaaggccctctgtggcttccccctcggtgccctcatctgaaagggaaaaggaggtaagctcaacccaggagttcccagaggcagggggcagccgcccagtaccacctagtgggctcaccattgtctgagtcgctgttgtccgagcagtccgtgcgggtggctttgctatctggctcatcaggactgccgccctgctttctcttcttcttcttggtctgggtcataagggggggaagccgtgtcagggtgcatggcacccggcccttagctccgccccagtgggaactaagcttcccagaggggaaggctgcctccactcactcggaagtcggctgtggtccaggtcttccaggtccgcctcatctgcttcatgccattgccaaacccgaaaccaaagcgggagccgcccgggaaggcgcccccacctcgcatgccctggaacatgccgtactcggggatgatgttctgggagaagagggagggcagccgagaggcaccagacatgcactggccccgggcccccatggggtcttcccacatgcgcccatagcctgaggccattggccggccgctccgggcatcccgggcccagccctgtgccctgggaccgaaggtgtcgttgccacgcatgcggaactggtcgcggtaggcatcgtattggccctcataggccatttccatctcagggtcaagctcgctgtagtcatagcctgaccggtacaggtcgcgctcactcaggacggccctcgagtcgcaggactcataagagtcatacctgcagaggcatggggtgagcatcaggtggagcccctcaggatccctcacctccaggcaactgctcctgccctccccaatctcccagtccagcacccaccctgccctggttgggaggctcaatgttcagaaatgccgattaaagagttccagcctctcagctgatataggggcaccactgccccaaacttgaatgtagccacacactggcttggggaccctaagaaggactgaaggactgataactggggtggaggctctagtccagtgagtctcaacaaggggcagagctgctccacagccctttgggaacatgtacaccatctgtgggagctgcaacgcccaaggctgctcctcacagggcaaggctgagcaccccagcaccctgcaggatgcaggcaggtccagcacaatgaatgcgcagccagtgaggctgatgatacccatgggaaacactgttcttgtccctcatggctggggaaccttcaaactctgcaaagtccctcattaccaaaacaactgagacaaaagggggagtatttcccagggaagacactgagagcttgcccagggacaagaaaaagagctgtattacatcaaccctggagcccagagccagacaccaaactctatataccctgtattgcaactgggaaggcaggccagacctcctcccaggacacagagggcaccgcagagagctcttttaaccgtgactgcagcccgcagcccacacccctacaggcctggaccccacacacctcacaggcacaggggctccccttgcacactcttccctaaacctgggccaccaagaggcaccggcagctctaagagcagcagttggtgctgccgctgctctgcttaccccgatcccaggctccaggctgtggtaagaaggtgcatagcagcaacgcaaggccaagcctcacatgccaagccctcagctctgagtgctgcagctgttgggccaggagttacagagcccatggcatcaaatccccttgtgcctgttccacaccctgccaccacagccctggggcctcccttggccctatcagtgctcagccaggcaactccttactcttggctctcactcatctgttagctggtgctccactctatcccatgttagagatacacccacgctcctcaccaaagcctcgcactgggcataagcactcctgggccaagtccagttcagttaataacaaatgcccacagcatgatgctttggagtagggcagatctggtaggcgaggcccagccccaccaagtacttgctgcgtgccttcagggtatgacctgcctgcacttctgtatccccacctgcaaaatgaggacagcagcagttcctcacaggagtgcttccatcaggtacatgtttgtaaggcacaggagagtaaccaggaaatgcccacacctgccccgacccttacgtgggggtggcccagctcgcagtgatcagccccaaacgctcgtcccacccttcacaccaaactccatctgtcctgccctgacaccacgcaggaggcaaagtctcgagagaattccaaatggctgtccttggagggaggggtggctgaacactctgtttttgagggcacagtgaagtctgcccagtctgggcttgttcctctcaccgcaagctgggaaaggctgaccaccaggcagtgcggcaggggttgagggtgggtgagaggagacacaagtcagagacgggaagtgcaacggaccctgctgggagccacagcagcaccaagcagcggggaggaagcagacacagaggggcactcagagaggaaaacgcagtgggcagcaggcaggagccgcccctgcagagtctcaacccctaggcaggtgtccactcacctttctccacctgagccgtacacgcctccttgcatcatgtctgtctccaaatgcggcaccatatctaagcgctggttaattctggataaaacggaatcggcactggcgctacccgaggcactagtgtttgcatttgtgtcagagctaggcatttcccaagagtgtgaagtggccataccatacccatagttggtggtgttatcctggccatagccatagccatagccatagccctcgtagcctgcagtgagggagacagagacagacagatggtgggggcaggcagaggggaggcagacagagacagagacaaacacagatacaagggtatcttctgtcacagagagagaagaccctagccactgaagctagatgggccctggtcattctgatgagggcctcctgttaaggagtaggtaaccccagaaacatgccccctccccactcccaaccttggccaagcagggcagtggcagagaaacacagccaggacaaccccaagggacaggacagcaatcacaggaatgacacttgcctctatttgtcccagagttccaagttccatatcctacaaaaagtaaaagggcagttacatctatacttgcttacaatacaaggccataattcaggcgcagacaattattcccaggacctgactggtcagagcaggctgcacctcccctaaccgagaagccttgagctcgcgagcactgcgcaaatgacccaggccacttgctgccctggtgcctggctgcctgtggctctgagcatctgttatttaaggatccttctgttcccaacactctcaactaaggaacttggctcctatactcctccctttaagagccagaattagaaggtgacctccacaccccaagctaagtgctaatcagtttatagcagaaaacccaaccccagtctcccaagagtctgccttaaaagggagggccaacaagcccttgaattgttgactgtgctgtgctggaacacatcagtgagagaagcccaagaagcaacccctcgcttgagaaaagctgtggagagaacaatctggattatcaacttaatatgctctggattcaatcacaacacatgataaaacctcattccttcagtaacataaagccactgagaagtgacaaagtgtaaagtcccctgggaactctgagtcaaacacacagttcctccccaaaggagggcacagagcaggtgacccctttccctgggtctctggtgagacccaacagttgtttcccattccatgtcatctctgccccgcagaggacatgctcatcccagggcaggggaccgaagctcagtgagacagacagcagggcaataagtggcagaagccagaccacagcaggaagagtgtaagtcaactgaaaagatgagccagagagaacaggcaggctgtcgtcctgcacttgggttcctccacgacccagtgcacaaaaagaatgggaagaaatcagagagaagctgaggaactgctgatgaccactatgtttaacaagagagctcacaaaacaaaaactcttgggctggagaaaccaaaacaggcttctcatccatttgtttatgtatcccctgagcacagggaacagaggcttgcagtcccaggcactgctcaggcatggagatctgcctgttggtaagagagatgctaacagccagagagcagcatgggtaagtcaggagtggtagctgaggaaagaatggagccattctaagaggcaagagaggctggcagagccacataaagaaaaacacacaaggctgggtgcagtggctcacgcctgtaatcccagcacttcgggaggtcgaggcgggcggatcacctgaggtcaggagtttgaaaccagcctggccaacatggtgaaaccccttctctaccaaaaatacaaaattagccaggcgtggtggtgcacacctgtagtcccagctactcaggaggctgaggcacagttgcttgaacccaggcggcagagtttgcagtgaggtgagatcgcgccactgcactccagcctgggcgacacggtgaaactccatttcaaaaaaaaaaaaatagaacaacacacaggtagcccaggcagctactgtacacctggccaagtgactgtttgtaccagggacagtgggcactagctattctaaagaaaataggagttgggcgtggtggctcatgcctgtaatcccagaactttgggaggccaaggtgggtggattacgaggtcaggagttcgagaccagcctggccaatatggtgaaacctcatctctactaaaaatacaaaaattagccaggtgtggtggtgcgcgtctatggtctcagatgcttgggaggctgaggcaggagaatcacttgaacctgggaggtggaggttgcagcgagccaagattgcaccactgcactacaggctaggcgaccgagcgagactctgtctcaaaaaaaaaaagaaagaaaagaaaaagaaaataggatatggaggcaaaagcagatccatcagggctctgcttgggaggctacaatgtggtcactgcaagcttcacctgctgaggatctgccacaacagagtgaggaggcacaacgaaaggaagcagcatcaactccgtgaacaccactttacgttttaaggacaagcagggcctcccacgatgggcaactctcaggagtccctccaggcaaacactcactacatgccacttgctatgcctggagcaacccagactccttgatggacatcccagctgggtcccttcaggaggaagccttcatctagactggcgtttagggactccccaagacctgccctttctgaaagaacaccccaactcatttccatccccagaagggatgagatcatggttgacaaaagaaattttaaggagagagagagagagagagagagagagagagagagagagagatccttaaaatttatatatttattattattaaatatatacatatatatgtaaaaataagatatatgtacatatatatttttgagatagagtcttgctctgtcctccaggctggagtgtaatggtgtgatcacagctcactgcatcctcgacttcttgggttcaagtgactcttctgcctcagcctccggagtggctgggacaacaggcatgtgccaccatgcccagctaattttttctatttttgtagagatagggttttactatgttgcccaggctggtctcaaactcctgggggctcaagcctcccatctcagcctctcagagtgctgagattataggcatgagccactgcacctggccccaaggacataatttttaaaagaaaaaaggacatggtcacagtatgtgatatttatggaccaaaaatagaaaacaatttaacactcaactttaacgtaatagttaatcagattacacctacctactcggtgacatatcatgtaagcatataaaaagaatttactatgccttatgtggcacaaggaaatgcttctaacataaaataaagcaggaccagccaggcgcagtggctcacacctgtaatccttttgggaagtggggcaggcagatcgcttgagcccaggagtttgagaccagcctgggcaacatagcaaaaccccatctctagaaaaaatacaaaaaatagctgggcatggtagggcatgcctgtagtcccaattatgcaggaggctgaggtgggagggctatctgtgcccaggaggtggaggttgcagtgagctgaaattgtgccactgtgctccagcctgggggacagagtgagatcatatcttaaaaaaataaaataaaataagagcagtacccacaattctatccacctataaattattaaactacacaaaatcagtaagctgataaaaattaaacattaatatggtaggatcttggttgactgtttttcaaaatgttatttaaatgttatattgttcttgcaattcaagccagaaggaaaaataaatccatctctattctttcacaattgtgtatgtaaaaaaatctcaaacaaatctacaaaagagctactagaataagtgagcttagcaaggtttattacaaggtcaatctgtaagtcaaatttcaaatattacaaggtaaacctacaaatcaaatagcaatcaaatttctatatatcagcaatgaatggaaagtttttaaaagtaccatttcctatagcactaaaagcatgaaaaacttggcgtaaatctaacaaagtatgtgtaggatctgtgttgaaaactacaaaacactacatcagtgaagtgacatactgcactcatgaatcagaagacttgatattgttaagatgtcaattttctcaaactaatctatagattctacagatttgatagatctatagatccaaggctctctcactcaaaatctcagcatgaattttttaaaaaacttcataaactgattctaaaatttatatgcaaaagcaaagaaactaacaattttggaaaaaagaacaaacctggaggactcatatttcaagattactattaaccagtaatcaagactgcattgctgggcgaggcgcagtggctaatgcctgtaattccaacactttgggaggccgaggcaggtggatcatgtgaggtcgggagtttgagaccagcctggccaacatggtgaaaccagtctctactaaaaatacaaaaagaccgtgctgctgaacgaaatttagatgtacagaccaatggaacagaatgagagtccaagagtccagaaatagacccacagtatatggtcaactgattttcagtaaaggtacgaaggcaattcaatagagaaaatataggcctggcacagtggctcacacctgtaatcctagcactttgggaggccaaggcgggtggatcacctgagatggggaattcaagaccagcctggccaatgtggtgaaaccgtctctactaataatacaaaaattagccaggcgtggtggcacatgcctgtaataccagctatttgggaggccaaggcacaagaatagcttgaatctgggaggtggaggttgtggtgagctgagatcgcgccattgcactccagcctgggcaacaagagcgaaactccatctcaaaaaaaaaaaaaaaagaaagaaagaaagaaagaaagaggccgggcgcggtggctcacgcctgtaatcccaacactttgggaggccgaggcgggaggatcacgaggtcaggagctcgagaacatcctggcaaatacggtgaaaccccgtctctactgaaaatacaaaaagattagccaggcgtggtggcgggcaactgctcgggaggctgaagcgggagaatggcatgaacccaggaggcggagcttgcagtgagctgagatcgcgccactgcactccagcctgggggacagagtgagactctgtctcaaaaaaaaaaaaaaagaaagaaaaaatggttttgtttttgtttttgttttttaaacaaatggtgctggaacaattatatatttatatgccatagaagaataagaaaccttaacctatactgcacaccttgtagaaaaattaactcaatatggatcacagactaaatgtaaaacccacaactaaaacacctaaaagaaaattctaaagaaaatattacagatttcttagatataaaagcaaaaccatcatctattaaagaaaagattgaattgggcttcaaaattaacaacttgtgttctttctgacacaagacaagacacactgacaagagaatagacaagccacagtctgggagaaaatatttgtaaatggcatatccgagaaatggcttgtactcagaatatgcaatccagagggaaaataattcaaaaggatgtgcaattagggactacatttgatgaaaagggagaggcagggagggcagcacagggaagtcaagcaaaccaagtttctcctcatttatgagacacctgataccttctcactcaatttcaaaatattttaagtcttcccttttcctgggactagctgctgttacttggggagcttacttaagtctctttatgcagtgacccctgaaggcatgttagctgtgtaggatcagtctttccccagatcttggtagtaaaagaaattacccatctcagtaactaagacattatccctgttaattccaaagagggctccttctcaacagatacccctagagtcacagacaaccaaaaaccagctttaacagcagtccgggctgccacagcacacaaacaaaacagcatctgtgaatcctactggtggctacttctgaattagctaattaggtgtttctgtccacgctggaaaactcaatcagagatcttcactcaactctgtgtgtgtggagcctgctggcttgaggtggcctggctgagtctccaaaagctgccagattcacacactcagcctctctcccacagcaaggacatgcactatgctgggactaagttaatagcttgctttctcctggaccaatcctttggacttttttttttttgagacagagtcttgctctgttgccaggctggagtgcagtggcatgatatcggctcactgtaacctctgcctcccgggttcaagtgattcccctgcctcagcctcctgagtagctgcgaccacaggcacacaccaccatgcccggctaattttttgtattttagtatagatggcatttcaccatgttggccaggatggtctcgatctcctgacctcaagtgatccacccgcctcggcctcccaaagtgctgggattacaggcaggagccaccgcgcctggcctcctttggactttaattggccactgtgactcccagtccctcccccatggggatttgaagccaggccttttatcaaagagcctaacttgctcaggaacacagctacttttcccataattgcctgaaagggaagcactagctattcaaatggccacaccatttcacacaagtttaggtttaaaaaagcatgacagggtgacagcaaagccaaaggcaactaagaagacaaggaactgctctgcagaacactttggttcccaccagaagtccacacttaccataatcacaggtgggctgagcgctggtatccgagtatgtcgactgcaaagtggtttcagatccctggacaaagcctaaacataaagacagtggggttaatttccacaagcaagtcacagggaaatgacctgagactacctaacctttggtataggattgccagcaggcccttctctcaacgaaaagccaccaaaacctctagattccacagtttaattagaccgtcagaaaatattacccaatggaaaggcaggctatgtttaacttgctataccaggaggactagattaaaaaattatttatttactttttaaaaacaaggtctcactctgtccgggctgcaacgcagtggcatgatcacggctcactgcaacctcgaccttccaggctcaaacaatcctcctgcctcagcctcccaagtagctgagactatacgttcgtgccatcattcgcagctaatttttatacttttttgtagagatggggtttcatcatgttgccctggctggtctttaattcctaggcttaagcaatccaccctcctgaacctcccaaagtgctgggattacaggtgtgagccacagagcctggccccaaataaaaatttttaaacatttaagccagtagcctattttgagaaatgaacacccaagttatcattctgttaaatgaggaaactattcaaatccctgaagggtgagccacttggaattcaaacaaggatggaggttagcttcaaaaccatgttaaagcaaataatacccccctccctgttctaaatctgaaacagaaactgctttttattttggttttcccattaaaaagtgtgtataacaattataacaattatttctgggccgggcagtggctcatgcctgtaatcccaacactttgggaggccaagatgaccagcctgggcaacagggtgaaaccctgtctctacaaaaaaaaaaaaaagccagctgtggcagcatgtgcctgtagtcctagctacttgggaggctgaggtgggagtgtcacttgagcccagaaggtcaaggctgcagtgagctatgattgcgccactgcattccagcctgggtgacagagcaagaccctgtctcaaaacaaaaacaaaaacaaaaaacaattatttcttaaaagtaattatttggggtggcatggtcatatggaaataagtattattatatatacataaaatttcctatcttctcaactttcaaactatttctcaacataaaatgaattagggctggatgcagtggctcatgcctgtactcacagtactttgggaggccaagggggggtggactggttgaggccaggagttcaagaccagcctggccaacatggtgaaaccccatctctactaaaaatacaaaaattagctactaaaaatacaaaaattacagggcacagtggctcacgcctgtaatcccagcactttgggcggccgaggcaggtggatcacgaggttaggagttcgagatcagcctggccaatatggtgaaaccctgtctctactaaaaatacaaaaattagctgggcgtggtggtgtgtgcctgtagtcccagctgcgcaggaggctgaggcaggagaatcgcttgaacccaggaggcagaggttgcagtgagccaaaatcatgccactgcattccagcctaggcgacagagcaagactccgtctcaaaacaaacaaacaaaaccccaaaattagctgggtgtggtggcacctgcctgtaatcccaggttcttgggagggtgaggcagaagaactgcttaaacccaggaggcggagattgcagtgagtggagatcgtgccactgcactcaagcctgggtaatagagcaagactccatctcaaaataaataaataaatgaaataaaataaaatgagttagtgccaagtaaggaaaacttctacctctatcagaaaccagtgctcctacagactatgactgatgctaatcctgacacttgctttaaaactacattaaaaaaagaaaaaacaacaactctacagttagaaatacatatatatttttttgagacggagtctcgcactaggttggagtgcagtggcacgatctcggctcactgcaacctccacctcccgggttcaagcgattctcctgcctcagccttctgagtagctgggactacaggcgcgtgccaccatgtccggctgatttttttgtatttttagtagagatggggtttcaccatgttagccaggatggtctcgatctcctaaccttgtgatccgcccgccttggcctcccaaagtgctgggattacaggcgtgagccactgcgcccggccagaaatacatatttttgaataattttctctcagcactgaaattacgacagataccataagaggcagtatttgcctttcccatcagagccaactcatgacctgaaaattaaagcctatgcctttaacagcttgtttacatcaaaaacctacagaagtgccttccccctgggtaagcgttctcttatttgttgacagtgtctctattttatctcttaagaccacagcagcagcagccaacagcaaacaagtgctttccctgcagggtgctaagaacatttatctgcaatgatctcatttcatcctcaccacagacaataagggcaggtgggcaagattccttactctgcaattcccccaggtccaaaagggtctgaacaccaagtgttttctaccagtgtggtgccaaaactcacgctggagctgttttcacctgtaaggacatttataatctttctttgtcctacttagtgcagaattaatctatttaaatacaaggtgcttccccagaccccacgtgacttctcttaagctagaattccaaaatacatctagctccaagggttccaaagacggagctgtgaacccagcttcatcttcactttccagagtagggactgggacttgaggcaggataaaaccgagggtatacagatccagtcttctaccttccctaagtaaagaggctagaaatccattcaaatggattccttccagggatctggaccttcctgagatgcctaaaatccaggcattgttgattaatagctgtccataagaaacactgagagcagctttgaagagttcacccaggggaaagccttataatgtaaggaatacccagcccctgcggtctccactgtttgctcaactggcctctggaaacttgttctttcagcaattgggccaccagtaaaatggcctcagactttaggtaatgtgatctgtgagtactgcaactgcaaatgacagcctaccacaccctcacaagatacagtcagcaagctgctgagcaaaatatctgtgtctgttcaggcgagaggggccctggtgcttccctaggaaggaaagacgatccatcaaaccctccaagatcaatggcaatctctgctctaactctataccctgcaccacattaacattctgttccacaataccatctgcaaagatcgcagagcaggcccttctgtagccagttttggctcctattatgaataattcttttttttttttttttttttttgagacggagtttcactcttgttgcccaggctggagtgcaatggtgcgatctcggttcaccgcaacctccacttcccaggctcaagcgattctcctgcctcagcctcccgagtagctgggattacaggcatgcgccactacgcattttgtatttttagtagagacgggttttctccatgttggtcaggctggtatcaaactcccgacctcagaagatctgcccgcctcggtctcccaaagtgctgggattacaggcgtgagccaccacgcccggcctaaattcttagctggtttgtaaagtgttctcttggtacaatttatcagcctgattagcgctggttgaaaaaaataaaatatgccctatatggccctataaagctaaatgttagatcacagatttctttttttttttgtttgtttgtttttgagacggagtctcgctctgtcgcccaggctggagtgcagtggcacgatcttggctcactgcaagctccgcctcctggggtcacgccattctcctgcctcagcctcctgagtagctgggactacaggcacctgccaccacgcctggctaattttttgtatttttcacagagatggggtttcgctgtgttagcgaggatggtctcgatctcctgacctcgtgatccgcccacctcggcctcccaaagtgctgggattacaggcgtgagccaccacgcctagcccacggatttctttctttctatttttattagagacagggggtctcactgtcatccaggctggagtgcagtggcacaatcactgctcactgtggcctcagcctccggggctcaagtgatcctcctacttcagtctcctgtatagctgggactatagccacgcaccaccaggcccagctaatttttgttttctttttctttttttgttttgagagacagggtctcactatgttacccatgctggtgttgaattcctgggcttaagcaatcctctcactttgagaccatggatttctagttctgcagcaacactccttgcttttaaccaatctctcgtcaactttttttgctcaaaaatacaaaagcaggccaaatgctgtggctcatgtctgtaataccagtactttgggaggctgagttgggaggatcacttgagcccaggagttcaagacctgcgtggcaacatagtgagacctcatctcagaaataaaaaattagccaggcatggtggcatgcacatgtagtcacagctacttgggaggctgaggtgaggtgggaggattacttgagcacaggagggcgaggctgcagtgagctatgattttgtgccactgcactccaacctgggcaacatagtgagaccctgtctcaacaaaacaaaacaaatgcttctcagttttatacttttcctttctcctttttaaaaaagagtatatattttcttgagacaggatcttgctctgttgcccaggctggagtgcaatggcatgatcatagctcagcaatgttgaactcctgggctccagcaaacctcccagtcagccgggcgcagtggctcatgcccgtaatcccagcaccttgggaggccagggagggcggatcacaaggtcaggagatcaagaccatcctggctaacaaggtgaaaccccgtctctactaaaaatacaaaaaattagccgggtgtggtggcgggcacctgtagtcccagctacttgggaggcggaggcaggagaatggcatgaacctgggaggcggagcttgcagtgggccgagatggcgccactgcactccagcctgggtgacagagcaagactccgtctcaaaaaaaaaaacaaaaaaaaaatcccagagtctcgctgtcatccaggctggagcacagtggcacaatcatggctcactgcagcctcaacctcgcagagctaacttttttatttttaatttttatagagaaagggtcttgctatgttgcccaggctcatctcaaactcctggcctcaagcaatcttcctgcctcggcctcccaaagtgttgtgattacaagtgtgagccaccgtgcctgatctaaaaaaaaaaaagagtcttatttgaaggagtaacacagagtaccaaaaattaaaagataactggaattaggttaggttgccttcaatctttattatctgagccaagagtagggtgacaaccatcctcaaagatggtctccattcctgcctcttaacgttatgtagatccctcccaactaatagagctagccagtgcaaccaataagatttatgaaaatgactgagtgtgacttctgggattttcgccttgctctttctgggatcattcagtctggagaaaaccagccaccatgttgtgaggatactccagcagccagccctagggagagatccatggggccaagaattattggccagcatcagcctgccaggcatgggagtttaagtcaccttggaggtgggacctccagcctcagtcaggctttcagatgactctagtccacatagagatcctaaatgtaacctcatgatattccaagctagaaccacccagtgaaatcacctatccattccaaacataaagaaactgtgtgagacaataaatgtttctatgacaagtacagtagcatttcagacctttgtttgagggcctgattctggatatttctgtgctgtttaccactgctctcctcttcccctctcagtgctagagatgcagcttcctttcccacgtataaataaggtaacagggttcaaaagcagggcgagttaataaaaagatttatcagtcaccttttatgtttaataatgctaacatttgcttcgaggcctctaggacttacccttaaagctattagttgtctgaaatgtgaattaaaatgcctttgactttagtgccctacttcttaaataaggggaagactcacattgtaaattactgtggttttcagtttatcaagataaaggaaaaactaatcattacttttttagcttggctatctcagtgcccacccaaacccagaactacagcctacaagacctagagctggaattcaggtttggtcattagtgaccttgtatctcagtttcctcatctattaaaaaaaagagctccattactcagctaccccacagcacccaaccattcatcttctggtttcttcaagagtcctgtttttaaaaaccatgaaactgtcttccagttcttggtaagacttggtgagaattatattccaatcccagggatgtcagtaacaaccccatagtctttcctcctgaactaggaaagctacagaaaggctctggcagagctgcccaacttgggcactactgatgtttgacgccagatacttctttgcggtaggtgtcattgtgtataccgtagcagggcagcatcccaaacctccatccactagataccagcagcactcccactcccatatgtgacaaccaaaaatgtctccagacattgccagatgtcatctggggcagaatcacccctggatgagaacccactgggctgggggatggttgctagaaaaactggggttcttggaaagctcctgacctggcagccagggtagaggggactggcactaccttcttgcctatgccaacataaagtggtctacaaaggagccccacagactcacgttgcattctcagttctcaaaattccaagtagaatgcaggttacctggcaaccacacacgctcaagcctataataccctcaccaaacagggaggcctagtgtaagtctcctggccgagaagcctcatcagtcactgccaaggcaaacccaggaggccttggcaattcacccagtgatgatttacagtcgcccaagcatattgcggggggcggagaggggctctcggatctgtcacccactctccctttcaaatcccattggcctcccactggcctccctggctgatcttctaacaagccaggcagttcctgcccgtaagccttttacagcaaaagctccctgggccagatatctttattcgctccctccatttaggtctctgctcaaatgtcacctctttacagaaggctccaaccactccacgtagtggagcgacccccgcacggtactgaccaccctaaaatatatcctacactcgcttatttgcctattaagatcctcgcctctaagctgcttgaggaattcttgtctgtattcccaatacccagtctgtaccggacacggttcatttgacagacgcagagggaattaacatggaaccttgtcattccttgcagttcagcccctaggggcccaaggctccccgctcagcccaaacccttccaatatttacttatccccctagggcctggcgcctttcccagttctgaaatagacaaaagggggtggtgggtgggatcgggatgggggtgtagagctgcggcgtttttgcagagaaactgcgcgggggaggacgcgacaatggcgacggcagccgagcctgctgcctgctcgcaaggaccaaggcctgagaaagggaaacctaaggcgtcgaggtccaggagcgcaggccagggacggaggtggtgggggcggagacctcgtgcgctgaggcccggacccacggacacaggcgacagaagccaagacatcaggcggccgggagccgggacgccggctgcagacacagagagctgaggcaacgaggcgtgagggcagcgaccctgaggcgacgggccagcggcgccattttgtgaccgcagggaaggcagtgacggggccccaggggaggtgcgggcaagcctggtgcggcatccgcacgtccctgtcccatcccccacgcagagcccgaccccaccctgccaggcccacctgtgtagctcatggtggcgggcaacacaacatccgacgacgccggcttctgctgctctgaacatccgacgctgcgatagctgctgctaaccacagggtcccctccacacacacccgagccccgcctcccgaccgcattggctcataccggcctcggcttcacgtctattggaaggaaccgctgtctatctctatgcctcctcatatcagtggctggaagctgctggcaatctcgtgagagccccgccttgtccccgccttctgttattctaaggcctcagtgattggcctacagaagccggcagagaggcggagtcctatagaatttgagggggcggagctgtgcactacggaaaggcccaaggcccaagcatggtcgggctggaggagcgcccgtaccctggagacccgccagagggagtcgggtctacggctcagggcagggctgggatgccaactccgccaccgaggtgctgggtaggggacctagctaagtctctcaaattctctggccttcggctccaaaacaagcatagcaaagccatgttgagaagagaaaattaaaacagcaccaaacaagatgctggacacacgtttcaacattacgtgacaaagtgtgtgtaaagaaatcattctggtgccagtgcactgaataaatgtgattaatcgtaacaaaacgataatatatttatatggcatatgcttatatgtgtaataattccgtttgtattgtgtgtcattcgaatgctccttcaaacctgcaaaaagcttttaatcctcacttaaaactgaagcttggaactcatgatttgctcaaggtccttgacagttacgtgttaaaatgggagctttgcttctaaaaccctcctgattcactctgggctcgagagatcctgcaatagtgcagccgggcaccagtcatgtcctcagtctgtttcctgggcatatggaaaccctgccagggacaactcataatttctagagatgacagagctgcaccgaagagtacttaacacgtgtgtttgtgaaaactcattaagctgcgcaattacgacttctacgcttcgtgtgttttaaaactttttttaaggtatgctgtttctttttgatattgttgatttctttaggtgtaatagtggcatttacaacgttgagagaaacatactgaaatactaagaagttaactgatcttatggccaggatgtgcttcacacaattcagacaggtagagagaggaggaggaagcaaggagctataagataaatctctgacagctgaagacattggtcatgggttggtgatggatagatgagagtccattttactgtttgctctacttttgtatagttggaattctccatgataaactgttttaataaaactccccccacccaaatgaggcttctgcagaacttgctgccatacggaacaaagccacttctgatgtgttaagtgagcaaactccaaacatgaagcagagatctgacggataagcactctggcttcggggttcatctccccatcagcctcagggatgcctgcctgtcttccaaaccaaggcagggccccaggacacgtcttctgcgccctgcaggttcgttccttcatcgcacttgccacagtcatcattgtaccgatttgatttcgttcacatccaacaccctcagagaccacggctcaaaagctgagactttgctgcctgaggtgtattgaagtggcttgagcagagaagagcaatgctcagaaagttttaggaaaacatccccctgcaagaactggaggtgactcttccaaggacacacatgaccctcacttcactgcatgattggtggggaggaacttgccatatgactttataagctcttgtatcatttgactgttttttgtcacatctagcctataccacttttatatttcaaaaactgacttacgggccgggcatagtggctcacgcctgtaatcccagcactttgggaggctgatcacttgagctcaggagttcaagaccagcccgggcaacatggtgaaacccccgtctctacaaaaattacagatataagccaggggtggtggtgcatgcctgtgatcccagctacctggatggctgaggcaggagaatcacttgaacccaggaggcagagactgcagcgagccgaggtccctacactgcactccagcttgggcaacaaaatgagaccctgtctcaaaaaataaaataaaaaaataaaaactgacttatgaaaagttgaaagaggaagaaacacctttgagtcagctcacaagatgctctccctgcttcctaagtcctggatacatccacccacccacagcacaggatggagagaagtggttgcggccttctgccaccaggcgagatgtgcgtcctgaccccacaggagcagacgtgtgggccaagaccacccttgtgggcgttattgcagcctgttaatccctccttcccaggaaggggtatggtgggagggcccagaaagcagggctgggggtagaggtggccccttctgtccacacgccatgaggtcgttcccactctccagcacttgaccgtttagtaaaaacgatgagctgaaaaaccacatgcaataaacaagaaggagcagccaacaaaatctcttaaaatctcagaaatgttcaataaacatttgcagagcgagaaaataaataacatcgcaaaggagccagtggctcctcttttccccgcatgttccttgggtcaggggtgcatgtgtctcactagaagtcacatgtattaaaagcaggtgagttccagctctctacaaccccactggcccccacccaaatgctcccaacgggtccctgacaccctcgctggtagctcctgcctttgataagctcctctagcctcaactgcttcttgatcctggctcccttcccagacaggctgcccagaaccctggttcatctgctcactggagccgctttgccagccagccagagaccccctcccagccatggcctaaagagccaacagctgggaacttgggctcatccccagctgcgtctggtcggcttggcggccaactggaaaacccagggcctccatggcgctctggacagaggaggccccgatcccagccccggctgccagccaatgccagcctgtccacttgacagaaaaacacacgctggccgcctgccccagggtgtttccagaagagaaatttaatctaatttacatacttctaggtacatcgataaccaaaatgtggccactgaaaaaagttaaaaggtcaatcagctcctggcttctagctggcccaggattgcaaaataaaaagatccacgttccttattctctacacaaaacgcgtttttaaaaaagtgaaaggtctagggagctatacatagaaagcaacagtgaaaagggagagggagcaggagtgggggaggagagtcccaccccccaaccccaccctccagggccccagagcccctgaggctctttggggggccttgacatggcaggaggcagctgtcagctctgagctcttcccagctgggaaggcccctctcgggggcagccaacaaggatttccgtggcattgtgggctcagtggggggctcccaggccccagcaggccccacagagggagcgtggcttcccctgagcaagcaccgtggcatgatgtggtcgttcaacccaggaactgggggtccggggcaggtcccgggtctcacgaggtgcgtgttgtgtgtgttcgcatgtacatgtgtgtgagaggatattcatgggggagagagggaaccagaacaggggtctttggggtctttgcaaatggccacggatggcagacatcgccctgcctggctgctagacgggggagtgctgtcctcccctgtgaccagaccggctgccatcagagacctggctgctgcccctgctggaccaggtgggcatgggctgaaggaagacaccctgtggccccagagtcctcgggctgggggaagggcagctagctggctcccggcgccctggctgtagtgtgcccggcccccaaggggcgccggtttgaggttttggcttgctcctttggaaacggaaagaaagaggaagagggacaaggacacagaggaggaagaagaggagacagaggtggcacgagaggggatctggaatgcttttgtgttagggagcctctgccgccgctgtctgtgcctgcggggcctgggactcctcaggtggggggtccgctttggagaagttcatctccaggatgtgccgctgtaagtgccgcacccactcttcctggatggagagggggccctggaattccacctcacagaacctgcatgggggaacagagagagggagtggccagtgctgtgaggagaggcggaagcatagccttgccagcatccctgggcacacctgctgctactcagtgtggacagagccagcccaggaggcgggggaagagggacccagaagtcaggcgtttcccatggacagccacctccactcaccatggggtcatggcagggtctcacagagacccctgcctctgtgctcagaagtcactggtgccaggtaagggctactggcttccaggtacccctgccatctggcagatacatagaatctgagacagtagagggcacagagaagcaaatcctacccaacgcaccaagccccccacctcctcctgtcttcctggcacctaaaaaggcctcacagcacagaggcctggagcccaagctccatggctcaagacgtggctttgactctgacttctgacttggcctgtatggcctcaggcaagtcacctcacgtctcagagtcccagttcgctgctcttcaatgtacttgtggactttggtaagaattaactaagatctacttttttcttgagccagacactagttgagtgcttacttaccatgtgccaggcagttctgagtgctttataaatattaaattcacttactcctcgtaacaaatctgtaaggtaggtttgttatcaacccgcttttatgagtgaggaaattgaggtaaggagcaggtaagtccttccctgaggtcactaagctggtaagtggcagagttgggatttgaacccaggtctcgcaggctacaaagctcagggtgtcagcctttagcctgagccccaccacacccaagggcagccactgaggcgacacctcccagcttccaccaaaccctatcctgttccaaggctccgggtgaccaaggtccactcaggtggtctccctccctcccccaggggcagcctacctgcatttgagggtgtagatgttgcccacgaacttgacaagtgatgtctgggggggccggggcaccagggaggggactggccggactcggggtgggggttgccgcacctcctccagcttctgctgtaggtcattggtgtcctcgcctccccgggctgcggaggcatctggagggcgggcttgtcggcgttcaaattctaaggtggagagggggacgggagatgagtgggaggggtggatgctgcagagacttggaatacacaagagctgaggactgatgctacctggatgggtgggatgggggatggatgggtgaatgggtaagcaactggagaaaggacttaagggccacagcagagcgcctggggagtggctgggtgggcctgacaggtgcccgctgcgctcccgaccctcctccaccaagcactcactgttgatgttctgccgctggtgctcctcagccttcacggtgcctggcgggctggctgccagaggccgctcaccaccgtcggctgcccggccagcctcgggccctggctcccctccggcactgcggccgaccacggccaggcccccgggtgccagccccagggacggccgcttgtcactgtcacggccatggccggcactgcggaacttcttggtgaaggggcggccgccctggatgtagctgcggtaggcgcccaccttctggggccggtgtttgatccactcgctcagtgtctcgatgggcgagccattgacgcaccactcggtcacgccgaactgccgcaggtgtgcccgtgcgtggctggccagggccttgcggttttcaaagtaaaggccacacagctcgcagcaggcctcggtggctgcggggcggagggggtgctgctgagtcacagcccaaagggggcaggtgcacccagatggccctgcccaggccaggtgccaatcccgcctcccacacagacccagccatgggggccccacttggggtcagtgtgcacgcttgtggcattgcctggcctggcaggccctggcggtcgccctcccaggaccctgccgcccgctgcttacaggagtgggaggtcttctcatgaagggtctttgccttgaagggcagttcagtctggatgtaggtcttggccttgacctctgctgggaggaggcggtcctcctgcaggggccgcttggctgccactgagcccaggtagccagtggctgagggcttggccccagtgatgggcgtcaggctgagctcacgaggaacctgggccggccctgcacctggtttgcctggccggccagccaggggcgacagcggcagtggggactgcacgggcccaggggccacggtgggaggcccgtcctcagccagggcaggggccaggtctccagccggtggctccttcttgatgaggcacggcttggacttcttcttgaggatctctcgcagtgtgtcgatgggcgaaccattgacggaccactcggtcacacccatctgccgcaggtgtgagcgcgcgtgactcgacaggcccttgcggttctcgaagaactcgccgcagaactcacagcggatgtcgcgcaccggctctgcccgggacgctgcaggggatccagggtagggggaaggaggaggaggaggaggaggagggaggaggagggaggaggagggaggaggaggagggaggagggaggaggaggaggaggaggaggaggaggaggaggaggaggaggaggaggaggaggagaaggaggcggcggctgcgggcaggaagcctccaagctcaaagcccccgtatcagtgccagctgcctagctacccctgtccacaccacccaccagaccgcaacaacctgctccctcatctgggcttccagaggcccttttaacatctggctcttctgcttgttctgtcacttcaaattctagctggcttcaagatacctccctgtatgatcctgggcaagtcactttccctctctgagcctgtttcctccgctgcaaaatggagatgaaaacccctacctcccagtgttactttgggacggtctaaaatgggaacagctctcagcatggggcacagagctggtacacaacacacgtgagcgctaaggcacaagcctgggctgccctcacctgctcagcacacagtgggcatccaatcaacctgagcagaatgaacacagtgctggtgtgacaggcaagcgagcaagtgacattacaatgatggcatacagagttttctgtaaccaggtgctgtgctaagtgctttatcccacttaatcctcaagaaaaccagacagagttgggactatgctgatctccatcttccaaatgaggaaacttgcccaaggtcacataaagctagactgtggaggaacagagatcttaactcacacttgactcccaatgtcaagcacttaattaccaaaaatgtcagaaagacacagttcagacgttcactgccagtccctacgctcctgctgtagcagacatcactaatggatccccgcagtctttctccctaggagtctggctggcagccactaccaatcgattgaaatggcacaagagatggaatctttctgctgtcactgaatgacacaatcctgcttctcaaatgaataaaggacaattgagcagcagctcagttgcaggggtctgcatagcaggaatacacagctaaccctgtgtcctctctacctgcgtgtcctcccttccaattcaaccctaggcactctggatacccccaaggggaggcagggaggagacccctccaactgttctccctgccctactgcagggtcacacttacacaggttcaggggtgtcatgtcttcccgtggtgccccccagggaccctcagatgggtgcagttccccatgaagggcccccggcagcatctcccgcttgatctccacccgtatttgttcaggcttcagcttcttgggcaaggagggtgcagccaggcctgggaacatctttcgggccgtaggaggaggagaggcagttggtgagtggcccagggggctgcccggtggtggtggcaacttcttggccaagggtgagatgtgaaggtccgaggggctgcgggcttccagtgagctgccaggacctgcgccgcccatcatcttggccagggcttttgggcttggccctggtgggttgggaggtccaccaggccgagactgggtccgtctcttcaggatctcccgcagcgtgtcgatgggcgagccattgacgtaccactcggtcacgcccatttgccgcagatgggagcgcgcgtggctcgagaggcccttgcggttctcgaagaactcaccacagaactcgcagcggatgtctcgtgctggctctgggcctgaggctgcagcaggaggagaaaggggcagttagcatcgtggaactgccagcatggtcacctgcaggagtgtcctggtcggctgggcgtgggcggcagcagcacgcccacaggttagggtggtgagggcaggtgcaggtaagggagtggaggagcggggctgggggccagatacccggcaggagtgaggggaggctccagagagcacatgggccctcagtcctggcggaggaggatggaaccaagattccattgctctgtgggtcccaacaaggacagggtgaggcagggaggcagcctaggtgctatgtgccatccagacaggggcagatgtgggtgctctgcacactaaaaggcaggatctccccaccttggccttcattctcaggaagggtcatggaggtcaaaggccaagagagagggcctagcagcccactgccaacaagatctctgggcagaaccggcccactgccaagggcccctgtctactccctgccccagcagggagggggctgtgaccccccccccgggaggggctccagggcccgcagtgaggagggggcagctgaagcgagaacctacagaggttgagaggagacggctccacatcagaggcccagaaaatgccggcggctgcggcggccgagaggtcctgcttcccccaggggctggccatacccgcggccttcagcttggccttcttggccggcggtggggggggaagcaaggagagggccgcggaggtgggaggcggccgccccgggtgggccagggcgccgcgcctgggtgggaggcggatctggacgccgtccctcctgatgagcccgtggagcacgtctatgggggatcccttggcgtccggatcgctgacgcccaggtggcgcaggtgggcacgggcgtggctagacaggcccttgcgggtctcaaaccaggcaccgcacagctggcagtccagctctctgcccccgtcactatctaaagctgcggagacaaaacacagggggggttcacggccgccaccttggccggccttgggggcctgaggtaggagggtctggtgtgatttttggctgctcaggcagttggggggtccaagactcaggccgcagatttcttttgaagtttgggaagcaggacatcctgtttcctgcctagccctttggcatcgaggggagtgtagagagcttaaggactttgggtagacaggcagtgaccaaattctaggtaatcagatactcccagaccctctcccctaggatccctgctatgggagctatttgggggcgatggtggctgctgggctcacgcagccaagggcacacctgctcaaggccctgcccctggaagcacggcagactcagtggaagcaacttcaagggaacataaggtgccaaatggggggctccattgggcagggggtgagaccctggggtcacccccagactctaatgtccacaaagatatgggaaagcctgatgttgtaagggacgtccttgttaaacctgctcactgcacctggagggtttcttcccaaaccctgcctgccgtgcccacaggcagcccaggaggtggggcttcaccggcaggcgcagagagctgcctctgcgtggtggacagccaggaagacttgatgacaggaccaatcgtgggcacctcccatcaggtgatcccctgtctatccaagatgcttccaactaccactgagaaagctaggccacaggaaccctggttaccttcaccgcccctacccacaggcccagagaaagccaagagctgcccctcagtggcgagcatgaccctggcaggctcatcagccgcagtgaggctttcaggggaagatcagcaaagtaaagtgggaggcacgatccacatccaaggcggcccaaaaggagatgcagaggcttgaccaatactctggcctggctggcccaggacatgggagctgtagtccccaccgcccccacccaccctgggccctgtccctgggctacagcccaacctgaggtcccgaccctcccagcgccagaacctccctcggctcttgggacccacactcactgaggttcaagggcccctcatcctcagactgaggccactgtgcctttggggaggccggccgggggctcagggacagctgggggctcttgtcctcaggattcttaggggtaggggagcccgccagggccagtggtgtctttttgaggagtggagagctgggcgggtggcccaggcccttggccgagaagccgggaggcgacttgatggctttgttgacagcaggggcatccaagggcttggccaggctgagcaagccgggccggggggccccggcgaccacctccttcagtgagctggacttcttagccaggcctgggggcagcccaaggtgggcgtcaggcagacccttctgcttcacaagctcgtagaggaggtcgatgggtgcgccgctgctttccgactctgccactcccagctgccgcaggtgggagcgcgcgtggctggacaggccctttcgggtctcaaagcaggcaccgcagacctcgcaggtggtcaggctctgggctgaagggcaacacagaggccgggagagcaggctgtgaggcccacggcccagctctcccgcttctcctcccctgagagtcccactcacccaggctccatggaagtgttttgcctccgtcaggccccccaaacctcacaatgaccctaacaacgcagagaatagcttggctgctttgccaataagggttagaaactgagactcagagagggaaaagttgtgcccaagggcacacagcaggagatagagcccttctgtcatccagccagtgggacacctttcacaacctttcaggcctacggggtgccctggcaacaggttcacacaaacgctgacctgacagccacatgcctcactgaactaagttctaaccaccctctgtggctcaactcctgcccgaaacactggtccttgcagtctcctgcaccctcttccacagagcctttatccttgcctatctgcttctctgtctccccgttccccaacttgaatggccctcaagagcaagggccaaattcattttgctcctctcacctccctggagtccaccccagggcccgtcactagtcaataacaaccttaggatcaacagacgaagaaatggtgtcatgcgagagactgcacagctagcaaaggccagattcagcaaatgagctgggtctgagtatgagctctggaccaccacacccactgcttctggatgctgtccctcgccccgtgagggtgcagctcagggccacgcatgcccaggacagtagaagttcaagagagaagacagctgagtgccaaccttggtgcctcaaggtgccagagggaaaactgcgggcaaccttgggccccacattaaccccaaggcacgagagtgctcctgtgagtgtaaccagcctggccagcatcccctgccatgccacctgggccactcacccttgaggtcctgcagctcctgtttgctgccatgaggaacctctgcagccactttgctgctcagccgactggccacctgctccagggccccagggacaggcaggctcttcttagggagcgagggagagcccaagtccatggccaccattgcgttttcctcagaacccaggcctgtgggttggggagacaggctcagcccagacaaatttcaggctgtctatacccagaactaagaagatggccttcttccttatccttgatgtccgctctcactctgcgaagcgactcaccccaggaaagctgaggttccaccataacccccagcaccagtccagtgcagggacactgaggctgccactgacagcagacgccagcagctgcttccacacactacagcatggacaggtctggggtctaatgcaaatctgagcccaaactcccatcccaggggatctcaaagaaaagatctctctgggcagaacttgtgagggggaacgtctgcctgtctcgagggtgagggtgggaggcactcagagagggaattcaacacaacaccagggtcaggaggctggagaggccacacagaggcagggagccagggagccagggacagggaggtggcttcacagcacttgtgaggaatctccaccagacaagacagctggggctgcagagacaatgggggaccaggggtggcctactgatcacaagctgggccctaagtggggtaaggtgtctgcacctacagctatctgacttcggacagaaagagttggaatcacagaactttgtgttaagtttctgagacatctatcaggcccgcagcatccctgggtgaggagtgtgtggcagagggaaccaagggtgaattttcacgtctagttgttcaaaggggcctgggaggccagttgaactccaaatttagagttcagagcaaaggatgaaggaactgtgccaaatggggccttggaggcgttcagtgggatgtaacggggcagggggccatgtaggttctatgctcagtttgagtctcgcagaagcaaagagtaggcgctgaggactggggcaccgaggactttgtcaaagtctccgggtcgggtgggcgcgtctgtcagatggggcagggctgaagtgagtttccgcaccggacggaccggaaccgtggcaagggacgctcccggggctccaaagggggcaagggacatctgtcagacggggcaaaggtctcgaggagcggcggaggagtgtttctgaggcctgggaccctgcgagcggcgacagaaggccctgggcccacacaactaaagggcctgggggaggggggggtcccgcagactggacggaaggcgtcgggggcggcggcaccggcaggcgggattccgaccttcccctccccacaccctcccaagcgcgggctcttaccgggcgcgggagcggacgcgggcccgggccccggctccggctcggccttgggcccgtcccgcggcggcggtggcggtggcggtggtggtggcggcggcggcgggggtgggggcggcggcggcggcgcggggggtgccgcggggcccgggctcggggggctgggcgggggcgcccccgcgggcgcgcgctcccgggcgccccccgcgcgcggccccgccgccgccttgctctccgcttttgtcactcggcactgggcggtggaggcggccatcttggctccggcgcacgcggggcggccgccccaggcgggagcagctgagcgccgagtgccgagtgccgctgccgccgccgccaaacccgctccgccccgcccctcagggcgcgcccaggttggcctgccgagtgccgagcgccgagcgccgagtgccacgagcgaaaccgttcgtctgggccctgagggcggacggctgcagctgctggaagcttgtcgcgcgccctggctagcggatgcacccacgctgggcgcccagcggcctctaaccgccgccccagcccagtccccggacatctctatccctaggatgggaatcttccggcctcactcagacccccttaaacaacgtcaaaactcttaagagccccgacgggcggagctaggacctgccctaggaccctgccccattccctttccggaaagtctccatctccgagtcggggatcctggaaaacacctgatctccaaccacaagaatccctccagtatcatcctgttatccaaccgtcccccgacggtgccgttccgcagacctagggaaccccacaaggccggcaacacatttcaatcaccgcctgcttctctctccgattgtccccagctgttccttgacagttgggtggggctagaatcggaacattgccccgcccccaacctggcacccgccccctcctgcccacttagggagagggggcaggcttctaacgacagccttgcagcgccagtgcccagacctagccctaatgttgcatatccttacttaaggcaaggcttccaagatcttcccaatcactccctaaccgccaaccctctgcctcgcagttattcactgaaagactggtcatagctctccctcccaaggacaaggccagggcagtgccaaacctggctcctctcatccgtaggctgattccttataccccagtgcctcctgcacccctagccatcctcagagccagctctgtctcgcagccacccctgagacactacaagccagacgtgggtgagctgagtgcctggggagcagcctttagcagaagcaagaagcctgaggtcaagtccccactctgccccttcctgaggtgtcacctcaaccagcccctgtcctctctgaacctccaaggagagggggctttgatagccccaccctcccctttgcaggctcatgaatgcccttcaagtgggcttgtgagtgggtctgactgagcccagagtacagatctaggtaggaccccagcagctgcaagtaggaatagtaccgaaggggccgggtgcggtggctaacgcctgtaatcccagcactttgggaggccaagaggggtggatcacttgaggtcaggagtttgagaccagcctggacaacatggtgaaaccccatctctactaaaaatacaaaaaaaattagctgggcatggtggtgggcgcctgtaatcccagctacttgggaggctgaggcaggagaattgctttaacccgggaggcggaggttgcagtgagccaagatcgtgccactgcactccagcttgggcgacagagcaggactccatctttaaaaaaaaaaaaaaaaaaaagggccaggcgtggtggcttacacctgtaatcctagcactttgggaggccgaggcgggcggatcacaaggtcaggagatcgagaccgtgctggctaacacggtgaaaccctgtctctactaaacaaaatacaaaaattagccgggcgtggtggcaggcacctgtagtcccagctactcgggaggctgaggcagaagaatggtgtgaacccaggaggtggagcttgtagtgagccgagatcgtgccactgcactccagcctgggcgacagagcgatactccatctcaagacagagcgagactccatctcaaaaaaaaaaaaaaaaagaaggaatagtatcaaaggaagccccagcctccagcagtcccaggggcgataccccctgttcagacactctccattcctcagagcccaactactttttgtagccaagttctctgccttgtaaaggctcgtgcaaagccaggctgtgcaagactgggcccttcacttgtccactccctttgcagtgcccagtcctgggctccttcaccaaataggacttatggatttccaagccatcctccactagagacaccaccaaacaagctgctcagaagtctagctctacagctgtgtggctgtggcaaagaagatgacctatggtttccttatccttaaaacagggacatggccggtgcggtggctcacacctgtaatcccagcactttgggaggacgaggcaggcggatcacgaggtcaggagatagacaccatcctggctaacatagtgaaacctcgtcactactaaaaattagccaggtgtggtggcacgccctgtaatcccagctactcaggagtctgaggcaggagaatcgcttgaacctgggcagcggaggctgcagtgagccgagatggcaccactgcactccagcctgggcgacagagtgagactctgcctcaaaccaaccaacaaacaaaaaaaaacagaaacacagcaatcttagttgtacagacttacattgaggcataaatgagatttaacacgttaaaatcttagtacaggggccaggcgtgatggctcaggcctctaaatccctgcactttgggaggctgaggcaggaggattgcttgagcccaggagttccagaccagcttgggcaacacagcaagaccccgtctcaaaaaaataaaaaattaaaattaaaaaaccttagtacatagcaagcatttgataatggagtagcatatcaggtctgccggataaagcaaacattggttgaaaatctagactctaggccgggtgcagtggcttacgcctgtaatcccagcactttgggaggccgaagcgggcagatcacttgaggtcaggagtttgaaaccagcctggccaacgtggtgaaaccgtctctactaaaaatacaaaaattagccaggcgtggtggtgcacgcctgtaatcccagctactcagcaggagaatcgctggaacctgggagttggaggttgcagtgactgagatcgcaccactgcattccagcctgggtggcagagtgagacttcatctcagaaaaaatctagcctctaggctgggcacagtagctcacgcctgtaatcccagctctttgggggcctgaggcaggcggatcactggaaggcaggagtttgagaccagcctggccaacatggtgaaaacccatctctactaaaaatacaaaagttagctgggcgtggtgatgagcgcctgtaatcccagctactcaggaggctgaggcaggagaatcacttgaaccccggaggcggaggttgcagtgagccaagattgtgccactgagctccagccggggcaaaagagcgagactccatctcgaaaaaaaagaaaatctagactctagatctgcactatccaataggatccccactagcctggcactagcttcatttcaacttcttaacagccatacatgaccaatggtgtccctgtaagacgtgcagatatctagagaatatttccagccatcatctcagaaagttctatacaacaatgcttctcaagatagaagatgtcattaacagcaaagaatctggggcccagctgcctgggttttaaatccctgtttcaccctttccagctgtgtgacctcaggcaggttaattaaactctgtgcctcagtttcctcatctgtaaagtggaagaaataataacacctgccttataggattgttgtgaggatgtaaatgagttcatgtttgtaaagtgcttagaacgatgcctggctcccagtaaaagctcagtaagcatttgtcaaagtcactggcaggaaagatagtgaaaaactggatccagaaagagacctggcccagatcctgagtgaaacagaaaggacacctaaatagcagggtggttgtaaggaaagtcatcaacatactttgtaaagtgactcaaaatgcttccaggaaagctgagcggctgcccctccagccccgcccctccaatgctctgggcccctgggaaggatggggctccagcacagcccgtcccctccccttaccatctccataggctggcccagggtcctcagcccaggtgggtggaaagggcaccgtgagaggtaagcggggccgacgggaggtcaggaagctgccaggcggacccccaggctctcggcccagggggctggggggctgctcagcagcagaggtggccagcagctcctgcaggatgttgatgggtgagacagtgagctcccagttggtgataccgaagtcacgtaggtgggcccgggcgtggctggagaggccggcccgtgtgtcgaagccagccccgcagaagtcacagcgcatcaggctgaaggtgcctgggtcaaagttggccactgtggagagaggacaggactgcctgaggtggagagggggctactccccagccccaacccctccccatattcagggcttcaccctggactgcctttcttccccgtggctgtcccttttgctcctgcctgctcctcagctctcagctcgtgcatcctcccaccccattccaggaagcctgaccctcccagatacccccttcccacatctggcaacgtcaaggagggacctcttctgcaaaaacccttctccagggccaggtgtggtggctcacgcctgtaatcccagctctttgggaggccaagcgggaagatctcttgagcccaggagtttgacaccagtctgggcaacatagtgagaccccatctctataaaaaaattagctgggcatagtggtgcgtgcctgtagtcccagctacttgggaggctaaggtgggaggattgcttgagcttaggagtttgaggctgcagtgagctataattgccccatggcactccagcctgggcaacagagcaagaccctgtctcttaaaaagagaaagaaagaaaaagaaatgcttctccagttgtggacctgccatcatctatgagagtatttgattaatagccttctcgtgactatttttactcatgatcacgcaagtgctgtaaattaaatatttgttggatgaagaaatggacaaatggatgtaatgccctctgctgggagccttctctgagccctgcaactggagttagggactttgtctcagcttccccagcctcctggttctcccagctttccccgcatctcagccctgctcactcggtgtcgtcactgcctggtttcctggttgtcaccccttgcccccaacccctagtgcgtagacacacacacacacacacgcacacacacacactcaaacaccatactggcacctccccaagtgggctttgtgtctgccaatgtcagaaccacccagggtgctcctgttggaaacagacttctggaatcagagccttgtactgtgggaactgacaaaccttacaggcagccccagggggttctgaagctggccagtgtggggtggagggggtcccaccactcctggactgggccatgaactccaagagtccaagaactgctattctgtccactgctgtgtccccaggtccccagaacagaggggaaccttgctcagtaaatatttgttgaatggaggaatgaatgaaattctctgcctgaggctgactcttctacccacactccttcctccagtggctggaatggccaggggactggggcgtctccacacatccaccgaccaggtggccttcactgtggctctcaagtctctcaggagcagaggccccagtgtccccctgcttggcgctaagggagagaatttagatcaacggtgggttgcccagccatgtgtctcctgggcctttaaaagtgaagctgccctaccttttttcttcttcttctggaaggagaacctgcgctcaatggccttcacctcctcagcggagatgaaatggcgcacattgtagctgacgcccacgcggttcaggtggccccggacgtggttggccaagccgatgccgttgtggaagcgatcggggcagtaggggcatttccgctcctcgtgcttcagtgccatggccggatccccatccaggagtgtgtccagccccagcgggccgcccagcggcgcgtccaggagcaggaagtccagggggtgggcgcctgccagccccagctcctcgggctgcaaccttgggggcaccctggctgccgccatgacctgcggccccagcttcgccacgagcacaatgggtaccatccctcggagctgctgctgctgcccctgggtggcctctactgcctgcagggcctctcggaatgcctgcttcagctccagggccgcctgcgggatgaggctgggggtggctaggggtgaaaagaccccattttcaggggaaaaatccatctcggaggtcagcactacatcctcctcctcctcctcctcctcctcctcttcgctccaagggcgcctccgttcccccagcccttgtgggtggacggtgcttttgtttctcccgagctgtaaggagtagggggtggatgctagtgtggagggaaaggccagccttccgagaggcctctggcccgtgccatgcaggagtggctttgacagcgggaaatctctgatgctcagctgctggcatcctgggccaaaggccaggctggggtcgtatccagcagggttctcccgccacatgggggccaaggacggctcagctttgccaaagtagtccacagcagtgtcagggaagcaggcgtgagcatcctggctagtgcctggctggctggcagggtcttcctcataagcctcgccatcctcctcccagtggggatgggcatgcaccagcctcacgtgctccctgagcaggctctcgctgggcgcggggaaaccacagaagacacaggcgctgaggccaacggcagctccgtagggctgatagaggagggcgctggcctcagggctggggctgccagccccgctgctgcctccaaaaggctctttggtggtctggcctgggggctcacgcatgtgcagcttggcatgctgcacataggccctggatgaattggtgccaaagacacacttagggcactgcagccgtgcctcccggccctcgtctcctggaacttgcttcagcttttggatctcctcaatgatcttctcccgggaggcctgatgcagctgccggtgctgctccagggcagtggggtcagcaaaggcccagccacactccccgcaggccagcggggccaggtccgcagggggctcctggcccggggctcggcggtgctggctcatgtgctccaggaggtgctccttctgcttgaagtagatgctgcactcgatgcatgggaacacggccggctcctcgtcctcgtcctcatctgggctggccaccccttcggccacctcctccagcagctcacacaggtagggcccggtccggatcgggggcagtagcggctgcagccgctccacagaagcctccgagttcactgtccaggtctgtgtggctacctccgaggctgacgtgggtaggccccactcggacggctgggccagcccctccaggtcctccagatcttctctgccacccaccaccgccatgtccagcgtcttcggggtgtcttccactggcacaaacaccctcctgaagggggcgaggggtggcggctgggcaggcaggtccaagtgcagccctgcgtcctggggggatccctgctcgtcctcatcttggagccagtcgaacctggggcggccctgggcatgtttctccaaaagccttggttccccccggtggtgtaagaaccttctagagccctctagctcagcgtggggtttcatggttctcacaatgactgagtcctcgaatctccgctcagataggatgccctccccagcctcctggacaagggggtgctcccagggcccccggccatcaggggtacctgggaaatggcccaggagatggggtggtggggagcccggccggaagtccaggctgcctccatcccagcagctgcaaggaagtgccaatggggacaggttagccatgggctgcagttttccttcctagggtggtgatgggggtcctcccaggccgtttgaagcaggccccggagatccagcccgagggtgacaggggtgtgggggtgagggtgggaggtagggggagtccacgtggatccttccggacctatcgggtcaaaagccaggttcaactcctaggatgcacctgtccacaaagcctagccccgctgcattgtgggggaatgtacggagaccacccctgggccacacggggatgtggccacctctaagaagtctggtggcaacagtcaactctcatctctccccagggaggacccaagcctctcatctgtgctccaggctgcttctgtcttggttctccccaaactggggtgattttgctaatttagtttcacctctcccccagatttggcgattaactttgtggcagaacagttcaaaggaatgttccttttccctgcatctccccctccagaaaggcagagtcaggagaggttgaaggtccctgctaagcctttggccccagtgatcctgaccttcttgggcagaggggtgggagtggggctgggggaggcaaggtaaccactctgggcctcagttttccaatcctgaaattgggggtaattcccaagaactgggaacccctttgtccttatacaacatctgtggagctttctcatagccatcatcaacaaaaggtgcttgcaacacaaggcaggtgcttctttaaatgctcacaaccacaacctttcaatgaccccgcagggtgtagggtgaagatgacacaactcagtgcttgagaaatgctttgtttcacctcatgcctggcccagtgtgggttcttattatgaccatttgagatcggttctcccttccttttcaagatcctgcctccatcaggggatgccaatcacgcttatggaacagatgtggaaatgttccattcagatgttgggtggagaccataaggtcacctttctaagctccatcactgacatgcgatactaaaaggaccatcctcctggggctgtggcaaggattcagtggggataaacacatgttcagagtgtagctcatagcagctattattaattaattaataatattcttgctcattctgagagctattagtaatcctgataaacttactatgacctggccaggcatggtggctcatgcctgtaatcccacctctttgggaggctgaggtgggtggatcacctgagatcaggagttctcgaccagcctgaccaatatggtgaaaccccatctctactaaaaatacaaaaactatctgggcatggtggcaggtgcctataatcccagctactggggaagctgaggcaggagaatcgcttgaacccaggaggtggaggttgcagtgagccaagatcacgccactgcactccagcctgggcgatagagtgagactttctcaaaaaaaaaaaaaaaagatgactatgacttattagcacctgccaagccatttaataaagagtagggaccatcagcattgctcttgattcctgctctcacccaatgccccttggatcctcaaggcgaattcatgagatgcatcttatggactccattttgcagatgagaaaactgaggcccagagaggcctagtatcattctaagggtcacctggcagagagaggacttgaagggtccaacatccaggctcctgcccctctggccctgctcctggcagggataatgagagttgaccctctgtgttcattccagacctcccccaaccccagcacacgcccaggggcttgcctgccgggagctgactcctcctcctgcctggcctcctgattccctcctgtccccttctcattccccaggggcttatctgaggcctgggcatgtcctgcttgcccccctgccctccctgaggtcagggccagcatggcactcaccagctgctgatccgatgggtggcggaggtgacacgggggagggcttcgctgaggccgggatggggctgcccgtctgcaacagagaggggagaccctgaggggctggggtccccctggccggggccctccacaccccagctccaggagccctgccaggtgcctcagaaaggccctgctggctcccagttcctctccctgagaggcccgtggcctctgtggtcctgagccctgaaaggggtttctttggaagagtccccttggctctcctgggggaccccagggccttgctgccttccaaccctcctctctttcccccaacccagcagccagggtggttttttacaagcctcaccctggtaaaaactcacctggcttctcattatacctataataaaaaccagacttctattttttgagacggagtcttgctctgttgcccaggctggagtgcaatggcacaatctcggctcactgcaacctctgcctcctgggttcaagcgattctcctaccttagcctcctgagtagctggaattacaggcgtgtgccaccatgcctgggtaattcttctatgtttagtagtgacggcgtttcgccatgttggccaggctggtctcaaactcttgacctcaagcgatccacccacctcggcctcccaaagtgctaagattacaggtgtgagccactgtgcccggcctaaaaaccagactcttagccgccacctacaaggccctatgaggtcagacctctgctggtctctccaacttcccctctctctcctggcccttcaatgcctccattctgactgtatgggcctcctcaggaagccccaagcccacctaactcttttgggcctcagggcctttgcacctgctatgccttctgcccagggcactcatctctgaccgcctaactcaaatgagcccctatgattttctctctcagcacctgtttcatttctttcttagaactttctgaaatcacctggctctttcttgggatgactgcttgctgggtcccctactagcatgtagtcacagtagaccaggtactttgtcggcttcgttcactgcagcattctagcacctggcatggagcaagtgctcagcaaatccttgccagatgatgaacgaggcacctgttctaacctgagctgcagagagcccatccctgccttctgcaccctctcccaggcctatgtcctgaaatccaatcccctcctgggaccccctccccaccaacacagatggagccaactctctattatccgcctgtggagccaatgcctggagcgaccacaggaatcctggcctgcatctctgcccgccacacttgcctgacgtgggtaagcttgccaatcggggagcaggccaattgcccgggccaaggttaacacactgggggaacttgtgccccgtccagagcccgacagatgcaattgttggattagcctcaatttgaggatggtccagaaaaagggatagggctggggcgaattctttttccaatccctcatcatccaattggcccgagaaattgagagctgactgctgagagtcaagggataaaagtggaggtagggtggggagagggtgttgaccagaaaggtgtggtcactggctgagggtccttcttctgaacccaagaaaagggttgtgactgttgtgtgacctctggaaggggtggtgggggtatggaaatttgcatcatctacagcgcaaggtgtctcaacatcagcaccattggcatttggggccagatcattttctggggtggggtccatcctgtgcattgcagaatggtgagcagcatccttggcctccacacctccccagccctcggtcatgacaaccaaaattgtcaccaaacattaccaaagtgtcccctggagggggaggcgaatcacccccatttgagaaccaccaggatacactgatgggcagcagagctgtgcctgggtgcaagggctggttttaggatgggggtgttggagagggcgttcagagttgggaaagaaaggcctggcccagccaagaaacaggggctctagagaacatgtgagtcatagatttgacttttttcaggagagggcagccggttcacatataacctgccctagcatgacctagaggtgtgggtctgagggtcccgggcatcctgcttttgaggttctaggaccccaagctcccaagattccgggcgtcccagatttgatgattctgcgattgctgttgtctaagaattccaagagccaggggaccgcgtggcctctttgtctgagcaattccagcgaggctcctatttttagtggcagtgactttggaggaagcaggccaagcagtgccctgtgtccaagacaccttgggggtgggggcttcacccagaggcctccacagttgatggggatccaggagtccctacgggtcagatgaggcgctaggtcgcagcccttaggcagtggccatgccaaggggcccttgttggctcctgccatctgggttccccgagagagtttgcaaatgctgatggcaaggggtgtccataagcagcctgaactccaagcctggggttcaacttggtagagtggccaagaacctagattctggagccagacagatccgagttcaataccccaggggtgccctgaagggcgtgcctctcccactccgagccttggtttcttccgctgtgcaatgggaacagccaccgacccagtctcgcagggccagcaatgggtgccagcaagattgtagtaaatgctccatccagagaagtggcggtggaggggaagaaggctggtgggaggcctgggggatcagggctggttcagcgatgtctcaagggggaagcttgaggctagaccccagagcctcaggtccggtcactccatgctctgattttctccccaggctggggcctcaagacagcagaaatgatatgtcatttgtccctgggtgccctgtccccaacacaatgccaggcatgtaccagactcttcatcgatccatacagaccacctcagcccctgagtcttttctgaacctgggaggcccaaccagagaggcaggagctgcagagggggtgtgggagctctgggtaaacagccgtaacgggggacagaggaggcagcgggcacacccctgcccaggcagggaagtttggaggtggccactccagtgtgctcttggggggctctgagggctgagtggggataaaggaaggcccaggctttggggtggaatagcagccccagagcctgttcctatttataggcatcacaagactagtagggcaggtgcccgtgtcccggagggggagatcaagcgggcagagagggcagtgggagagacgtggtgtcccaaacccaggcattcttccaacattcaggccatgacctcactccaagtcaagccattcctatccctgcccccagctgctgagggaaaccttcaagggtgggcctggcccccctcagcagccacatttctctcttccccaagctataaaacagatgcacgtatgagaccctgggtgattccccagtgggagtgaggatgcacctacctgcctgcttttcccctctccccagacctggggcatctgcgaggtagagaagagatgtccaatccctcggaaccagacccagagaggaccctgggatccctagagcctgtaccctcaggctcccacaaaatcaaagtccccgcccagccctggccggctgtgcgacctggcacaagattctgcctctctctgagcctcagttattaactcagttattaatggcttagaggaggggattgctaaagtttccctgagtgctgatactctggagttgggtgtaccctctgccctcaggggtctcaccttgccaccccactgcctgacacctgcagatgccaccagctacctctaagccttggcatgtacacagccccctgcctagatgcttgcttcccccttggtctggctcattgtccctcatcctacctctcacttcctgcaggaactcctggttgctccccaccaggtgctttcctcatcacagccccagccgctgtgtcataacacctggtgacataacaccgggtcataacacggtatcataacatctgtctccccagcctcagatggtggggtctatgagagcgaggatggtgtgtgctcagtcaccgctgtgccccagggcgtggcccctagaagatgctgtgtatttataaatatccgagcatcatgagttgtaaaggtggccagagcaggtcaaggatctgtgaggatgcagcagggtggttaagagtgagggctgtcaagccatgttactccctggctaggtgacgttgggcaacttatgtcaccgctcagggtctcagtttccccatctctgacacgggataataataatgaaggctattccacagggttctttggagaatgacagaagatgatcttgcaaaagccttggcacggaggaagcccttgatgaggtgtttggagatgggggtggggggtgtgatacatcagcccactgttttccaggcataccagcctcctaccaggtccttggacacgtcaggctcctccccaccacagggcctttgcactggctgttccctccacccagaatgcccgtcccaccattcactccatgctccattcaaatgccactctatcagggagggtctcccaggtctcccaggcatgatcctggcactctgtttaatgccttcacagcatctgtcactacctgtccttctgatatttgtttagttgcttgttgtccatttcccctactagagtgtcagccccttgagggcaggaattcttgcctctttggtttacagctgtcttcccagtgcctagcacataccctggcacaccgaaggtgctcagtatttaatgaatgaataacacgtctggaggtggggagagtgtgagatacctttttgctgggtaaaccaaggggtagccagcatcgctgactacccagcctctccctagccactacagaagctgttttggcccgtggttcaggaacaggatacacccagacagccagagggagctgggatagactgatgggagtggggaatacctgtggaataagtgggctgggggcagggagtctggggtgctgagatgggcctctggacccaattagtatgctcagaggaggaagccaggctgacctgagttcaagtcccagctccataccacccagtggggagccttggtctggtcactggctcccaggacacctgttttcacaactgtcaaataagaaactaaacagagtacaaagaaaaggctctggacccaagcggaatcagcatcccagctcagccgctgctgcgctgggtgacttgactctctctgagccttggggaatgggctggatgctccctgggggccacacggcccattctcttaccagagatgccacctctgccatccagaatgtctcgggggccctccttggtgacaggcaggtaacgggtggaccggaagatgccaccttccccctcagcagcttcggccccaccctcgatgttctcccttggcgccgggccaggcagtctctctgggccttggggacgatctggtgcagccaggctgcctgccagagacccctccatcggattttctctgcttggatccactcagctgctgcaccggctcagcggggcattgtgggcctggggatagagagaaggaagtgcttaggggatggaggaaagggaatctgcctcagtttcccatccctcaaaacctcagtcctcaactttgcagctcactgcctcagtttacctcccagcccaggggagctaatggtgttcagaccttttccacacaccttctatcccaatggcccctaccctcagcatgcctccgtctccccatcaataactcctcccctttatacagatcctgcactgcctcagtttacccatattgacacatgcacactcagccacctggtcttcttccatcaatcttaccatttctccagacgcctcccttcattcacacacagctgcactttccccagtcctgccctcacatccatgcacacgcacatcctactgccatgccttcgtttcctcggcaagaatcccagccacttgtacactctgatcctatacaccgtcaggagtctcccatcattacccctttacttttctccattgggttgtcccataccaatgatccctgcacttttcccacactccaacccttcccccacacaggaccttagggttctccagcattaaccccttcacccccctccacacacacagcctcaagtgaccccagcattaaccctttcgcttctccccaacattatccctcatgcatacccagcttgggctcctccattccccccaccccccaaccaagattgctctagtcctcgggcgaaagaaaacgatagggctcctggtccagaaatgaggaccctggggagcgggggttgtcctctctacctataaataccttcaaggtaacggcggaaagtgaagggcaggaatgaggcgccctccccagggagatggtggggaggccgggcccaggcaaccggggcggggccggggcgccaggcctggttgcaggcgctgccctcgggggcctggggattcccagggggctcctccgtgggctggcagtcttggtgggggtccctacccaggcccggaggaagcacctgcggttgtccactgggtgggcactgcccgcggggaacgggcgggaccgcaacttcggagcactttggcagcgtggggagggggctcctacccggacgccccccaggggtcgcagaggtgggggctgcgccgcgcgggcccactcctcgggggtccagggtccgggggatgagccctccgcccgtgcaccccggggcaggagaccccgcgggacgcgccgaggtaggggggacacctgccccaagacccccgcccctccccccacctgcacggccccgcccccggccaggccccgcccctgaaggccccgcccccgcccccgccccggggggtcccgcctggcccggcccggcccggggcctcccccgccccgctacggctccgccccacccgcgggctccccaggccgggccgggcctcaccggggaggcggcgccgccggccaggtgccggggctcggagctcccctccttggtgcggccgtcgctgccgctaccgccgctgccgctcccggtgccggtgccgcggcctccgcagccgccgccgcctccaccgctcgggggacattgtccctttaaatcgctccccccgccgccccgcccccccggcgcgccgccgtgacctcagcgcgacagccccgccgcgccgccatgatggggaggtccggggcgccccccccaccccacccccccccccctcgccgccccggggggggcggccagcgggcgcgccgccatgttgggagtggccaagcgggtcacccttaaagggcccgcacggcctgagtccagggagaggccccgttaccatgacaacacccttgtcgtcccacaccccaatggctccttatcgtcccactggtacttccaatggtaggctcgctaaaagcactaaaagagtggggagggtgcagagaagttcccccatgggtcattgatgggtcattgataggtcattgaagactccacccagccaatttttagccttttgtcccctgccccccatcagctaccttccaaccacaagctcactccctccttcccaatcatccacactggacttcagcacctccatgtccctagagttgccctaggtcttcagtcctaagtcaccttctccacccagttcccaggatcacagcttccaggactaccccatcagacacacatcatggcctgttgtcttgtcttatccaccatgtatccagatatctaaccacctagctatctcatccacttcctcaatctatcaatcactcatctacctatccaatgaactaatcacctatccacccacccctccaaccacctattaattcacccaaacacccactcaacccacccattcacttcccatctacccacccattcatccagcacccaagtaaatactcatttatccatacaaccaagcaagtacccaaccatccccacacacatctttccgcccagccccccaaacatccatccaccagtttgtctgttgatttggtccctccactaacatgtaagttccatgaggccaggagtcctgtctagttcattattgtttctccactgcccagttctcaggcgtctcaggagacctcaacatatgtacatatgatatatataatcacaacattgaaaaaaattttttcttactatgaaccaggccttttctaggcagacatacccaacctggttaaccaactacccagctactcacctaccaggtcaaacatccagcaaatgctaacctatccgtctgccgtttgctccacccactctacccctcacccatccactcacccatgatttgaatgactcatttacccaatcattcatacacagtatccaaccatctccacacctgacccccttcctttatccgcctcccagacccatggcctccgtgacatgaggagggcctaggaagatgctctcactgtgggattgggaggttgccaggggtggaatccatgcttcattgagaagcaggtgctgcctataacaatggtgaataccttttatcgaatgcctttaactatgggtcctctcactgtgtagggaactttacgtccatttcacagataagaaaacgggctcttaagagaatgaaggtctaaggtcacacagctggtgagaacttgtgtacatggccctctccatgagacttctaattaggggagaatttgggagagatgaatagggcttgcggggcaaatgcctaagaattggcaattcttagtgggcaaagaaaccaccaatttcactgaaatcaagattttactgggcaacttcatactgccagagtggttgggaccagcagctccactccccactgtaggccaagtagggctaaggcaaagtcagacaccccccctaagatggctatctctctgctcccagaccacgtgtgatgaggcaggatgggcagctcaggtggtgtctccattgaggcagggtgctttgaggggctggggttgactccaagacccccgcgtccttggagaaagctgcaggctctggacagcatccctcagctgagcctgagttctctccatctcatttaggcggtgctcctggggaggcagtggtgatggggttcagaaaccaggagagggctgcaccgcaacccttgctcctccaccgcccagacctgccccagggctcagatggcaatctcaccaggtttttcagactgtgcccttcattgcttgttaggttgtgctctgaatcaaactctgagctcctgtgggggtcgggggattggggcgaagggcagaggctaaggaagtcccttccagctcctggtgggagtgccagggactccgggggcggagcttggagtggaggcggagcttgtccagactgaggggcggggcctaaatatgcttgaagaagggtcggaccagagacgggaatggttggaatgacaggacctatcaatcatcccttggaggtggggtttggccagtcctgggtggggtcgtgactgagctggagggagtgcccaggctgagatatctcagtgcccggcccagccaggttgggaggggctgatggaggggtggggcctggatgagagaatctgccagggtcctaggccgaccttcgttgggtgggtccacctgggggcggggcttgccaagaggcagggcctggacagacttattggggcggggccagggtggggcttggccgtgctaggcgtggtttgggggggggggggagggcctggtcagatctaattggatcgggcccacctgggggcggagctaatggagagggctgggctcacccagcacggagcctggagtccagatcctgcagctggccccgcagctgctcctgctgctccgtcaaggcccggatttgggtgctcagcgactccacgaggcgggacagcactttctgctcctcacgcagagcggccacctcgcactgcagctctgccaactgtggtgggagagcagctgtaatctgacccgttgtcccgcccctgtgtctccccggagaccctgacctcccaggcccaagcgctcagcgtcatcaccggcctgcctagttggggaacatccctcctgcggtacagctggggagactgaagctcagagagggtcgggctaggcctggggtcacacagcacagcgagctgggtacttgaacccagacttgcctggcccttcagtcttccccagtcgcgtccctgttcccactccccaggcgcggacctgggcctgaccttaccttgttcacaggtcggtgcgtgcccagtgcctggtttcggtcttgcggctggtccatttggcgctgccagggtaccgacggcttccgaggcagcgaggcggagtcccgggtccaaggccgggcgcggggcgctggtcccatgctcagggagcctttgggtcgcggccagggccccgcagattggcggcggcgggcaggacgccggaccgggacactctgcgtgcgctgcaccggccggggccgccgcaggggccgctcttcgtccggccgtggccgggcccaactctctgagcggcgaacgctgcgcagagactggctcttggagatgagaggggtgtgcttggggaggtcccggggggccaggaagccgggcttctcccctgcggagaggctaggggtgggatggaggatcttagaccctccactggcccctgagacgaccccatcccgacctgaccagaagtgacctcaccccccacgtgaacttgtcctttcttttttttttttgagacaaggtcttgctctgtcgcccaggctggagtgcagtggctagatcatagctcactgcagccttgaattctggagctcaagctattccccagcctcagcctcccaaatatctaggactaccagcacatgccactatacccaggtaattttttttttttttggtagagatggggtctccctatgttgcccaggcttgtcttaagttcctggcctcaagtgatcctcctgcctcagcctcccaaagtgctgggattacaggcatgagccactgagcctggctcctgtccttgacttctgactataatactgtcctctctatgacccttgacatctctccaccctaacctctcctctcatccccgacctcaaacacactgtgacctttgacccaaccctttctataacctgtgattcccgtctgaccctgggcttgacctctgctcacaatgatccaacttcacctctgacccctgtctgagccctgctccttcctgttcccacccatcagaccccagaccagacttgaggttacctggagtggacctgggccgggggcagtgggagacgcattggcactgacacaagcacaggctggccctcctcaatggctcgcaggatggtgggcagtggttccagggtgtctcgggttgtctggtgaggcatgcaggacagagactgagcaaagtctccagggtcagagtctcccaagccttcttgcctccctactctgggttcaggccatacctggtcaagctcagcaaaaattgtacagagctgggcatgcaggacagctaactggagggccagatcaccactgccctggtaaccactgggggcagcatccacatccaccatggctacctggtccaggaagcattgcatggctggtccatgttcctccaggaagctattcatgaagcccatgtaggcctccttctcaccgaacctggatcagggccaggctgggtgggtcaggtcaggcacctgccacccccacactcccagcatggtccccccacccctagcttcccagcacctacggggcacggttggcgaggttctggatgaccttggcaatcagtgtgagggtgcgggctgggccgggtgctggatggtctggtgccaaaccaaagaggctgggtgccaggatggcagggcacaggagccgcaggaagagggaggcgcacaccagtcgggggcccagcacctcagagccacgttctttacatgcttctcgccagcttgagaacacgatgcccagctccgcagggaaccagctggtgcagaagaggcaatgaatggtcagacggggaggctatgggcataaaggttaaagtcataaggttgggagtcccagaagcactgcatgattggtccatgatcctccagagagctattcatgaagcccatgcaggcttccttctcactgaacctggggtctgggctctaggattgggaatatctgagataacaatgcttggggttatgaatcagcatggggccatggcttatggtgtagctatggcaatcgctggggataatactcttatagttggggatacagggtcacatgaagacagaggttatgagcttggatgtacttataattagacatgagactggtgggccagagtacaagatataaagtaggattggggctctggaggtcacctagggtcagaagtcacttgattgaagtcagggattaggtatgcaggttaacctagggtcagaggtcaagggattggaatcccaggtctcctgtgatcagttgcatgggatttgaggtggagggtcacttaaagccagggatcatggacttggggcatcatctggtcataggattgaggtcctatgttaactggagccagtggcatgaaattggggatatggaatcaactgtggttacaggacaaggaattgggtctcaggttacttggggtcagtggtgatagggttgcatggtgatagggttgccagatgcagcaaacgaaacttcaggacatccagttaaacatgaatttcagataacggagtgatttttatttatatttttacttttatttgggacagggtctctgtcaaccaggctggggtgctgtggcatgatcatagctcactgcagccttgaatcctgcgctcaagcgatcctccagcctcggctgggaatacaggtgtgtgccaccatgcctagctcatttttaaaaagctttttggagagatggagtcttgctatgttgcccagactggccttgaactcctgggctcaagcaatcctcttgtctcggcctcctaaagcattgggattacgggcgtgagtcaccatgcctggttcaaatgagtaattttttagtataagcatggtcccaattattgcatcaaatttaactgagtgtctcctgtattttatctggccaccctaaactggaggtcggggctagcatggtaagcaggggtgggctaagctgctggggccctgattctcactcgtaggaatggataatggtttcgaagacctcctcgcagctgttccgaagtctggcctggtgctctggcagctccgaggctggacatttgctggggtccacttcacagtcctcagtagaagcacagagacgccgcacaacctgtcctgcagcccagcacagccagataggggctggggccatgaccaccaaaacctgccacacccatcctccaaccttgtcttcaggttattccggaggcacccaacatcttggggagctcccaattgtccccaggatcctagcacccccaaaacaccactcactaccagaatccaggttgctcaaggactcttagaacttcacccaggtcccctagctcaccagcaggccgctgacatggactctcccccagctcacccagggtctcctggaggtaatcctgtgccacgagcttcatgtactcatcgatagccttggtggccaatgtgttttcccggaacagcagcgcctcacggcctccacagcgcgccagctccgcagtgcccaggtcagtcaccagcgcctaggaagggcaggaggtcaggttgcaccagatgcagacagagtccaagggaattcggatccttggctggtccctcacaccagaggcacaggccccgccccttgtagctgatgcttaggcccagtccttactgctggggctcataaccgaggccggaacctctaaccctcacagcagaaatttaagcctttcagcgctgaggtgcaacctgggccccgcccctcacgcgtgatgctcaggcccctgtcgcagctgaagcttaggctccgctcttcaaggtgtcccgccccttatgggtgataattaggccccgcccctcacagctgaagctcaggcccagtccttcaaggtgccccgccccttacaggtgcagctcagccccagcccctcacagctgacgctcaggtcccgcccttcaaggtgccccgccccttacgggtgatgttcaggccccgcccttctaggtgccccgcccttctaggtgccccgccgcttacaggtgacacttggaccacgcccctcacaccccttcaaggtgtctcccccattacaggtgcaactcaggtcctgcgccccaactcctgcccgaagcgcgttatcggtctacccctggtagccccggtccgcgctgtcgcggtgccgcacctgcgcccggccggtggcccgcagcacgcgcaccatggctgccgccagctcctccttggcctgcgcaggcagcgcgggctccagggccccgcagaggcgcgcatagtggaaggtgaggaactccgccagctccttgtagcgctcggacggcagcacgcgcaggcgacgcgcccgaatccgcgcccgcagcgctgcgcccgccggcgccccgagcagcgggaaccagcgctccagaccggcggcaggcgcgcgtggggcgtccagctcctccagcgccagggccacgcggcccagcaccgcgcttcccgggcccaagccgcgcagccgcagcgacaggcgacgtgccggtggcagcgcctcgaagtggaagcgctcggcccagaagagctggcctgggccggcccgaggcgccgtgcgtgccagcagcgcgccatccagccacagctcggcgcgcacgccgggtgcccccgccgctgctcggggaagccccttcgcttcgtgcacccacacgctcagccatgtctcttcccgctccacgttgtcctgcagatgggagtgggatggggggaagcgttttggtttgttggcaccccaaagaaggcaccgcaagtgaagcgtggagcctcaaacctgttgcgtcgggtccctagggagattgctgggcctttggggaaagaagtggagccacgggagtccggaggcggttacgcggaagtcttctagcttttctgggctctccgggagagttgggggctccagggcatacaagagtagtactggagtaaagacttcgcgattgcctggcaggcagggctttgggtgcatatggggccgggagtggacagaaggggcgggtctgatattcccggggctggtaatagatggaaggggagtcttggagccgttgcaacgatgcaggcggggcaggtgtgttgggggcgcgggttatggagcgagctggctttgggtagagtggaaggggcgggccaggcctgtgggcggggtctccgtgtcccgcttttctgagggcaatgacctgggtgggctggaattggcgacgaaggtcctcgatccagcggtctctctcagcggccgagcgacaagagaagcagcggcttccacccgtccaggttacctgttgggatggagaatccaacggtgtgatcgaggccaagggtgaagccaaagggtgggaggtgggactgaggtggaatcgaggtggactgtctacacttacctgaaagcagtggggctcccccaggaggctggggtgcagtggccagatccgcacatcccgctcggcacccaggtccagttcagagagtgtggccagcgactccctagagcccagagcactggggggtctgggaagggggtgggtgagcacaccgtcattcctgcctcttccccatcccccatagcctgaagggtagaggaaggccaggaaggacttcaacccaattcggatcccgtttctcccccgtgccccccccaccccccgccatggcacctccttgcttttaggataaactcaactcctggtgacctacatgaccaagctgggtccagatgttgtcacctcatctccctccacctaatccatcactttctgagctccagcctccctggccttgttttattttatcctatttatttatttatttatttatttgagacagagtcttgtttagtgcggtggctggatctcagctcactgcaacctctgccttccaggttcaagtgattttccttcctcagcctcccaagtagctgggatcacaggtgcccaccaccatgcctggctaattttctaatttttatatttttagtagaggtggggtttcaccatgttggccaggctggtcttgaactcctgatcccaagtgatccacccgcctcagcctcaccaaagtgtgggattacaggtgtgagccaccgtgcccagccctatttatttatttatttatttattgagatggagtcttgcccttttgcccaggcaggagtgcagtggcacaatcttggctcactgcaatgtccacctcccaggtttaagcgattcttctgcctcagcctcctgagtaactgggattacaggcattcgccaccatgcctggctaattttgtattttaagtagagatgggatttcaccacgttggccaggctggtcttgaactcctgacctcaaatgttccacctgcctctgcctcccaaactgtgggattacaggtgtgagccaccgcacccagccctatttatttttgagacacaatcttgctctgttgcccaggctggagtgcagtggcatgatctctgtgcactgcagcctcaacttcccaggctcaagcaatcctcccactcagcctccccagtaggtgggactacaggtgcccgccaccatgcctagctaatttttgtattttttgtagaaatggggtctcactatgttgcccaggctggtctcgaactcctagactcaagcagtctgcccactttggcctcccaaagtgctgggagccacttcacccagccctcttggccttgttttagttgcttctttcggcctcttggcctttgcacttgttgttccttctgcctggaatgctttttccacccccctgttggcctagttaacttccatccacccttcagatctcagctcaagggtaccttccctaaccctcccagaccagttgattgacttagctcccattttagagttattgtgtcagactttgcccccaccctggctctgtgctagatcattcaatgtccccagcatcaactgatgtggggcagaacacagaggccacagggggtgtttggtgtagattggaatgatatgcaggaggtggaggaggaggggccagtgttgaaccccagcccctccagcctctcatacacccttacccatcccggggctccaacctggcctttttcttctctttcagcctcttgagcaacccctgtggggaagggaatgtcagctggacagaaatctgtgctccttcctcagctccttccctcccaagacatcccagaggatctactggtcttggaggaccaacaccaagctcaggctgtattagcaggaataataagagcaatcagcagctcctaattctttgttcatttgtttttttaagacagggtctcgtgctgtcgcccaggctggagtacagtggtgcgatcatggctcactgcagcctcaaatttctgggctcaagtgatcctcttgcctcagctgggactacaggtgaatgttaccatgtagaattggggacttgctatgttgcccaggctggtcttgaactcctggtctcaagcaatccttctgcttcagcctcccaaaatgttgggattacaggtgtgaaccactgtgcctggcccaaactcccatttgtaaagcatcaatcatatattctcctatactattcatttatttatttaagagatgaagtctccccatgttgcttaggctggtgttgaactcctggcctcaagcagtgctctctgctcagcctcccgagtagcttggactatagctgcgcactgccctgcctggctcctgcactctctattggcttcccataaacaacccctagagaaaggttatttcattagcttcatttgacagactgggactctgaggcccaaagagggtcagcaacctgctccagatcacccagcaagagtgccctttcagctttgagggtccgagagtcttggctctcccctctacctcccaccttcactggctgccttacccgaacgttgtggacctggttgggaccagcagtctccggttctgtttttccaggcatccgatctgtgggtcgttatgggtggcaggttggggggttggattctgccccacttttagagcctcccaaatgccccaggcctttccacccctcaagcttacctggatccctgaagttccccatggccacgtggatgctgccctcggagctagcacttcccacccggggccttcgaggaccctgttctcccgcaggagtgggtagtcagagaggggaggcaggcaggcaggcaggcaggcagaccgagggagaggcagacaccttcccattatcctccctccagcccctgcctctgttctgccctcctcctttttctttcttccctcctcccctttcccaggtgccccctctcacctcctcctctcctccaagcagcaccagcttcccatcaagcagggtgaagcccccaatgtcccagacaggcacgttgggtgtgggggcctcagggatctgtggggtagggggctccagctctggctccggctccagctctgggaagaagaggaggcactgggggacttaagagacgttttctctccctcaggctaccctttccattcccgaaggctcatggtgggttccctcctaggtgccccccaccccagcagccgtatcagactgtatgaccttgggcaagctttcatcgctgtctgggccttgtccccactaaccatgggtagcagacacaactcacctaccatgtgcccagtaccctgtataccactccacacaccttcttgcattgaatcctccaaaagccattcaaagggctatgataacaggctcagagaggttgagtgacttgctcagggtcacacagtttgtgagtggttgggctgggcttcagtcacaagcattcttctctctctctctttttttgtttttttgttttttttgcattcttctcttaaccaagacattatgtgggtccaagaggttaaaaaacaggacaggggctgggcaaggtggctcatgcctgtaatcccaacatttgggaggccgaggtggggcagattgcttgagaccaggagtttgagaccagcctgggcaacataacaagaccctgtctttaaaaaatagcctgatgtgcctgggctctgtggctcacacctgtaatcctagcactttgggaggcctaggcgggtggatcatctgaggctgggagttcaaaaccagcctgaccaacatggagaaaccccgtctctactaaaaatacaaaattagccaggcgtggtggcacatgcctgtaatcccagttactcaggaggctgaggcaggagaatctcttgaacttgggaggcagaggttgcagtgagctgagattccgccactgcactccagcctgggcaaggaagtgagactgtgtctcaaaacaaaaacaaaaacaaaaacaaaatgggaatataagcagtgagaattaaatgagcttccaggaaataggagggctgaattagccctcccagattgcctgtctgttcccttgtttttaccaccaggagcaataaatgataactcccgcttattaacggatcacttaaaatatgttgggcctggggccgggcgcggtggctcacgcctgtaatcccagcactttgggaggctgaggcgggcggatcatgaggtcaggagatcgagaccattctggttaacacagtgaaaccctgtctctactagaaatacaacaattagctgggcatggtggcgggttcctgtagtcccagctgctcaggaggctgaggcaggagaatggcgtgaacccaggaggcggagcttgcggtgagccgagatcgcgccactgcactccagcctgggcaacagagcgagactccatctcaaaaaaaaaataaaaaaaatgctgggccctaggctagtgttacattcctgagccctaattcttgtgatatccattactcttctagatccccctgtgtgacacttagcaccatctgtcattttttttctttcttttttttttttttcttccattgagatggagtctccctctgtcgcccaggcgggagtgcagtagtgcaatctcagctcactgcaacctccacctcccgggttcaagcgattatcctgcctcagcctcctgagtagctgggagtacaggtatgtgccaccatgcctagatacttttttttttttgtatttttagtagaaacagggttttgccatgttggccaggctggtctcgaactcctgagctcaggtgatccacccaccttggcctcccaaagtgctgggattacaggtgtgagccatcatgcctggcccatctgtcattttcttgttgatggatttcctgtcaattccactacactgtgagctccatggggcagggagggtcatctgtctctttcactagtgtgtcctcagtgcctaaatcagggcctggcacatacaatagaagctcaacaaacctctgcttgaataaatgaatgaatatgagcaaataaaattatatactctccaaaatggagatcattattctcactgaactgatggagaggctgaggcttaagggctcagaacaaagacacggaagctagaaggtaggagagtaggaggcaggctgaagatggatatccaggtaggaaaggatgggcctgagccattgaaggagagacccgttggggccaagagccgtttagcctctggacaatactatcacgggtttacattcactgttccttcctcagatggaccctctgcccacaggaccccggcaactcctcctaccctctttagggggaaagagggaacagggtagctgggccccagcggcttcctgctgggcttttgcactccccacaacttcctgtgtctgtatggttgatgctccggaggcagacaaaacccaagcatccggcttcccagcccggcccaagctcagggtgggggaaccatgtacctggggcctcctgctccggctccgggtctggctccggcggtgggttcttatgcctcccccagagggccttggagagtcgaaggcgactggtccgtgactccttgggaggcgcagataggacccgacggaatatcgagcgaggggctggctgggtgctgaccatgggctcctggtggctcagggccctgccccagccagcaaagcggccccagcggaaccctccagccgccttctccccaccgccccctgtgtgccagcggtaggaagtcagcggagaggtggctgtgggctgggtttgggaggtccggcttggcgacggtgggtccatggttgggggggggggtctcctgggggacgagagagtgacagtagtgcccagtgtctgtccacatactgccctcatctcggccccctccccaccctcagctctgcctccaggaatccccctgcccccacctccactccctcccttaccttggtttcctgaccagccccagaatcagcagccgtctgcaccccgcctggcttcctccctcggaacccaactccacgtgaccctctctgtcccaccccaccccacagccaggctgggagggcacagtgcgggcaggttgctggaggttcgagggaggagaagagaggaggtgggttaccaggcttctagcaagaaggacccagactgcctccctgacggggaggcagcacttgcccctctctctgagcctccgttgccttctctgcaaaatgagtacaggctgaacaaatgctggcgagaatacaaagcacctagaactctaatccacagttggccggagtgtagacccattcactcatgttgggaaacggtttggcaggatctactaacactactagctggatcttctctgactcagcaattccattgctaggtagacgtccaatagatatgcccccccagcacaatgcataatagccccacattggaagcagcctaagtacccattagtgggagaaggaataaattgtgatctcttcgcacagcagaatatcatacagcagtgagaacaaactaaagaatgatttaacttgggtgaatcacaaacaatgttgagccaaaaccaaaaccaaagccataaaatgccagtaatctgagctattcaggaggctgagggaggaggatcgcttgaggccaggagttcgaggctgcagtgagctgtgatcatgcctgtgaataggcagtgcactccagtctgggtgacatagggagacctcatatctaacttttttttttctttttcccctccctgccctcgggagaccccatctctaaaaagcaataataaataaatttaaaaaccccaaaacaatgaagagtatacactttgtgattccatttacataaagtcctaaagcaggcaaaaccatgtctaacaagcagggtatcagtttcttttggaggcactggtggctgggaagagggtacaaggggggcttctggaagatggcaagatttattattactcttattattattaattgatttatttatcgagaaggagtttcgctctgtctcccaggctggtgtgcagtggcacgatcttggctcactgcaatctctgcctcccggattcaagtgattctccctactcagcctcctgagtagctgggactacaggtattcaccaccatgcctgcctaatttttttgtatttttagtagagacggggtttcaccatgttggtcaggctggtcttgaactcctgacctgaaatgatctgcccgccttggcctcccaaagtgctggtattataggcgtaagccaccgtgcccggcccttattattattattatttataaatgaggtctataaaaataatatagatctcataaaataaaaatataatatttatattacatagtaatataaataatattacattatacataatatgaatattattattttttgtagatgaggtctgtcatccaggctggagtgcagtggtgccatcatagctctctgtaacctctaactcctgggctcaagagatcctctcgccttagcctcctgagtagctgggactacagctgcatgccaccacacctggcttattaaaaacaatttttttgttgttgttgagatgagggtcttgctttgttgcccaggctgttcttgaactcctggcctcaagtgatcctcccacctcagccccctaagtagctgggataataggcacatgctaccatgcctggcctattttttttttaattgaggtaaaattcatataacacaaatttagcatgttcttttttttttaataagatttttttttgagacagggtcttgctctgttggccaagctggagtgcagtggcacaatcacagctcactgcattctcaacctcctgggctcaagcgatcctcctacctcaggctctcgagtagctgggactacaggtgcatgctacctgactaatttttaactttttgtttgtttgttttttgtagagatggggcctcactatgttgcccatgcttgtcttgaactcctgggctcaagcaatcctcatgcctcagcctcccaaagtgctgggaatacaggaatagcatcagcctctgtgcccagagagacgaagccttgttctgtcacccaggcaggagtacagtggctattcccaggcatgattgtgggtcactgcaaccttgaattcctgggctcaggcaatcctcctgcctcagcctcctgagtagctgggactgcaggtgcatgccaccatgcctggctaattttaatttttttttttttgtaaagagacagggtctcactatgttgcccaggctggtctcctactcctgggctcaggcagtcctcctgcttcagcctctgtagtggctgggactgcagatgtgtgccaccacgcttggcttaacatgttctatttcttgagctgggtcctggttacatggctgtgtgctgttgtgaaaattcatcaagctgtgcccttgggagcactttcttgtatctctgttaggcttccacagatgtttacttgaaagccagaggtaagtaaatgccattctgaggaataaatgagtcagcataaatccggtccaggagccgagtaccagctggcccctctccctctgtgtgacctcagacaagtcatttcctctctctgagcctcgttttccttatttgtacaagacgataatatcagtttcaaaagattcatgtaagcctttgtctagtcaacaaatgtttcccgagtgcctattacatgctaggtgctggagaggccgcagagaactaaccaaacttggtttctgccttcctggagctcacagatgatggaggtagataagatcctaaactcatacatgagacatttctagctggtaaggaggacctagaaggaaataggctgcagtgaatgctgagcaaaaatgccactctttgagctggaaaaatcagggaggacttccctgaggaggtgacatttgcagccatttgtatctagcagatggagtccactatgtctgtgtaacaagcattccaaaagtgccagtgaattaacatgtccctgagagcagccctcacataataactggtgggaattagtgtataaataccccagctccctcaacccttgtgtgggatgactcaggtatgtgtcctatgctctccctcagggcttcgaagtgagactgagctctcttgcctacagtggaaacttgcttgaaaacacattattccctggctgcctccagttccctgcatcggtacctgggttgttcacctctctattttttctttttctttttttttttttccttccttccttccttccttccttccttccttccttccttccttccttccttcctcccttcctccctttctcccttctttcctctttctttcgttctttctttcttcctttctttctttttttttctttgagacaagctctcactctcttctccaggctgctgtacagtgacgcaatcatggttcactgcagcctcgacctcccagcccaagcaatcctcccacctcagcctccggagtagctgggactgcaggcacacaacattgtacctggataattttttctttttttgagacagggtcttgctctgtctcccaggctggagtgcagtggtgtgatttcagctcacggcaacctctgcctcctaggcccaagtgatcctcctacctcaagtgtgtggcaccactcctggctaattttttgtatttttgttagagacggggttttgtcatgttggccaggctggtcttgaactcctgagctcaggcgatccaccctcctcagcatcccaaaatgctgggattacaggcatgagccaccgtgcctggctatgcctggataatttgaaaatttttttttgcagagatgagatttcactctattgcccaggttgttttcgaactcctgagctcaggtgatcccctcgcctcagcctcccaaagtgctgggattacagatgtgagctgccgtgccctgccctgggatctcctctcaataaactacttgtactggaattattgtcttaaggtctgcttttgggaagacccaaactaagacaatgcatgatgatgcatgaacagagactttgtttccatgctgtctttattggaggtctgtggctggcagggtccttgggggtggctccctcctggatctcttagagacactcctggcaggtcttggcttaacagtctggaaaaagacaagggagtgtgaggcttgggggtggttgtggtatgtggctgggtctgccctcctggtggtggaaccctggatcagggaggggacagtggcccaaagtgagagagtgaggacaaagccaactataggccgagatggatgtgctagtcaatagcttaatgaaatggagtggcagtatgtaggtagcacgagattgtccaggtgtgattctaaaattgttttagtgatggcgatcaagggctgggatgaggtcatcaggtcaaagttgtgctggcataagagttgtcatcaggggttaaggagtcagggacgaaacaagcaacctcagagttgagattgtctggacagagaattgcaacacaggattaaggactggacagaggttgtgaaggcaaaaggtcacagcctaggttcatgttgtgtggacagagggccttcgggtaggggcaggggtgaggtcaaggttcggcgggccaggatgaggtggtgcagcctgacaggttgtgacttgggtagagaagtcatgaaggccaggctgaggttgtgagggcagaggggctgttggcaggtgtcagggtccatgccttggctggaaaggtagaggtattaggagctggggaaaggacaggctggctgggtctggggctgagctgaggctgcataggcagaagtcacaggatcagggatgttgcccgcagagtgacccgcaaaggctgggcctaggtttcctgaatagacgtgccgccgggaagttgggggcctggctgaggctgtgcgggcacagctgttacaggcagggggcaggggcctcgtggagcttgtgtagacggaggggcggcgggccgtgtagtgcaggctgcgaagactcaccgcggtgaagtgcggccaggtgcgcagcaggtcgaagagcgcgtcgccggggcagtcggtgcgcaccagctggcggtggcccagcagcgcgtagtctggccgcaggaggccggcgcgcaccgcacaactcgggagcgtgtcgcgcaccgtgcgcagagcggcctcggtgggcagcgccgcggtgtagttgcccactatggccacgccgaagccccgggagttgtggccgagcgtgtgggcgcccacccagtgccagccgcgtccctcgtacacgtagccgtccgagcccaccacgaaactgcagaggggagggagaagcaagcaccatgcggcgtgagggggacccgggcccttatccgctcccctccccgattctgttggtgtgccaagggccaccgaccccaagacccgcgcggtcgcgctgcctgtgtcccatccagctctgttccactctcacaccagctgccactccaggaccgttcggtttctctggatccgcccttcagtactggcacgcccctttctgcccttctcctccccacctctgccttttctcaagcccagttcttgcccaattcagagagcttttctgtttttgggttttttttctttccttccttccttccttccttccttccttccttccttccttccttccttccttctttctttctttctttttttgatggagtttcactcttgtcgctgaggctgaagtgcaagggcgcgatctcggctcactgccacctccacctcccgggttcaagcgattctcctgcctcagcctccggagtagctgggattacaggcacccgccaccacgcccatctaattttttttttaatttttatttttagtagagacggtgtttcgccatgttggccaggctggtctcgaactcctgacctcaggttatctgccctcctcggcctcccaaagtgctgggattacaggcgtgagccactgtgcccagccttctcccctcccctcgccacccctcccttcttcccttcccttcccttcccttttggagacggagtttcgctcttgtagcccaggctggagtgcaacgacgcgatctcggctcactgcaacctccgcttcccaggttcaagtgattctcccgtctcagcctcccgactagctgggattacaggcatgcaccaccacgcccggctaattttgtatttttagtagagacggggtttctccatgttggccaggctggtctggaactcccgacctcaggtgatccacccgcctcagcctcccaaagtgctgggattacaggcgttagccaccgctcccggcctccttcttcttttcgagacgggttctcgctctgtcactcaggctagagtgcagagatgcgatcataactcactcaagcctcgaactcctgggctccagcgatcctcccaccttagcctgccgagtagctgggactacaggcgcgcaacaccatgcccagctttttttttttttttttttttttttttgagacggagtctcgctctgtcgcccaggctggagtgcaatggcgcgatctcggctcactgcaggctccgccttccgggttcacgccattctcctgcctcagcctcccaagtagctgggactacaggcacccgccatcacgcctggctaatttttttgtattttttagtagagacggggtttcaccgtgttagccaggatggtctcaatcttctgacctcgtgatcctcccgcctcggcctcccaaagtgctgggattacaggcgtgagccactgcgcctggcctttttaagttttttttgtttgtagagatgggtggtgtgggggggtgtcttcctatattgctcaggctggtctcgaactcctgggctccagcgatcctctcttctcagcctcccaaagtggtgagattacaggcgggagccaccgcaccaggcctccttgtctgttttaggccatctctgcctggccccagacccagactctgccacaggtcccgctcctctcccagatcccgcctcctgtactagttctctaccctgactggagtcccatgatttagctattcccggtccctattaaggccccgcccctagcctaagccacgccacctctccaactttgctctacctatcaggactcctccttggtcttgccagctttcctcgggttcaagcccggtcccctgcatcaggctccgcccactcagaccccatccccgaacgtgggccccgccccctccccggtcgggcccctcctacctgtagccgatgtctccccagccttgcgtgtcctggtggtagcgctgcatggagcgcatgttggctgcgcagcgcgtgaagtccgtgcagggtggtgcaggcacgtaggtgtgatgcacgtacaagaatcccagcggcagctgcagcagcttcgggcggccccgataaggcgccgctccccagcggcagcgggggtggatggccgggcatcctacaggcaagggggttgaaggctggggtcaggaactgtttctctgcctgttcctccacccgcattaaagcgcacatacagaccatccctcagcctcctctcagatttggaaagggtccagtctcaccccacattggtcctccctggggaccaactaactatactcaactaaatctattttatttttattaaaaaaaattgggggtgggccggacgtagtgggtctcacctgtagtcccagcagtttgggaggacgaggtgggtggatcacttgaggtcaggagtttgagaccagcctggccaacatggtgaaacccggtctctactaaaaatacaaaaatcaaccaggcatggtggcacatgcctgtaatcccagctacttgggaagctgaggcatgagacaacttgcttgagcctgggaggtggaggttgcagtgagccgagattgtgctattgcacaccagcctgggtgacagagcaagactctgtcccccccaaaaaaaaattggaggtgggggcaggcatggtggctcactcctgtaatcaatcccacactttgggaggcgaggtgggtggattgcttgagcccaggagttcaagaccagcctgggcaacatagtgagacctcattttctagaaaaagagaaatcagatttcccaaagcaatctacagattcaatgcaatctctatcaaaatatcaaagtcatttttcacagaattagacaaaactatcctgaaattcgcaaggaaccaaaaatgagcccaaatagcaaaagcaattctaagcaaaacgagcctggtatcacattacctgacttcaaattatactacaatactatagtaaccaaaacagcatggtactgttacaaaaatagacacatagaccaatggaatgaaatagagaacccagaagtaaagctgcacacctacaaacaataattttcaactaagtcgacaaaaataagcaatgggaaaaggactgcctattcagtaaatggtgctaatggtgctgggacaactggccaaccatatgcagaagaatgaaactggacccctaactcttaccatatacaaaaattaactcaaggacagatgcgctagctcacgcctgtaatcccagcaattttggaggctgaggtgggtggatcacctgagatcaagagtttgagaccagcctggccaacatggtgaaaccccgtctctactaaaaatacaaaaattagccgggcatggtggtaggtacctgtaatcccagctatgtgggaggctgaggcaggagaatcgcttgaacccaggaggcagaggttgcagtgagctgagatcacatctttgcactccagcctgggcaacagagcaaaaactctgtctcaaaaaaaaaaaaaaaaaaaaaaaaaaaaaaaaaaaaaaattgctcaagatagattaaagacttacatgtaagacctgaaactctaaaataccagaagaaaacctaaggaaaacgcttctgaacattgggctaggcaaagaattcatgactaagacctcaaaagcacagagcaaaagaaacaaagtagacaaatgggacttaattaaaccaaaaagcttctgcacaccaaagatataatcaacagaacgaacagacaaccttcagaatgggagaaaatatttgcaaactatgcactggtatgggactaatacccagaatttacaaggaactcaaacaattcaagaaagaaaagaaagaaagaaagaaagaaaaagaaagaaagaaagaaaaagaaagaaagaaagaaacccactaaaaagcgggcaaaagacattaatagacatttttcaaaagaagatatacacatggccaataggcaaaggaaaacatgctcaacatcaccaatcatcagagaaatgcaaattaaaaccacaatgagatatcatcttactctaatcagaatagctattattaaaaagacagaaaagccgggtgatggctcacgactgtaaccccagcactttgggaggctgaggtgggtggatcacctgaggttaggagtttgagaccagcctgggccaacatggtgaaactctgtctctactaaaaatacaaaaattagccgagcatggtggcaggcacctgtaatcccagctacttaggaggctgaggcaggagaaacgcttgaacccaggaagtggaggttgcagtgagccgagattgtgccattgcactccagcctgggagacaagagtgaaactctgtctaaaaacaaaacaaaacaaaacaaaacaaaaaaaataataataaattggaactatcattcaatccagcaatcccactactggatatctacccaaaggaaaataaatcattatattaaaaagatacctgcattcacatgttgatcagggcactattcacaatagcaaaggtaagaaattaacttaactgtccatcaaaagagaattggataaagaaaatatgatatatattacaggcctggatggctctgggtctgagagccctggacgaaggtcaggcccaggtttccagctagggtgattgccaggaggttgtctacagtggtcggcaggaaatggaatactactcagctgtaaaaaatgacataatgttggctgggcatggtggctcacgcccgtaatcctagcactttgggaggccaaggtgggtggatcacgaggtcaggagatcgagaccaccctgataaaatgatgaaactccgtctctactaaaaatacaaaaaattacccagacatggtggcacatgcctgtagtcccagctactcaggaggctgagacaggagaattgcttgaacccaggaggcggaggttgcagtgagctgagatcgtgccactgcactccagcctgggcgacagagagagactcaaaaaaaaaaaaaaagaaagaatgtcttttgcagcaacatggatggaactggaggccattatctcaagtgaaacaagtcaaacacagaaagacaaataccgtaagttctcacttataaatgggagctaaataatgtgtatgcatggatgtagcgtgtggaaagatagatagtggagattcagaagggtgagggagagagaggagggaggatgatgacagattgcttaatgggtggatgtatgttattggagtgatgggtacctaaaagcccagacttgaccactatgcaatctatgcgagaaacaaggttacacttgtaccccataaattaatgcaaataaatataatgaagcaaaacaaaatgagatgaactcctattcatccttcaaggcccaactctggcatttcctcacctgtgcagctgtcccacccacccccgaccagatcccttattgccccctctggactctcctagtcctcaacttccctgaatatacggggtgggggcgtctgtgtctgtaatgggaaggatcacagggtgtggggaacttcctcacccaggaaggcctcagtgaattccttggtagcattggcagccacctgggccagctgttcttggctcatgcactgaagctggaggtgtactggctccagcctctgtagaaggacaagggttccccacacctgctgggccaggatggaggctgaagtcagagcagcaccgttctgccgtcggaagttgctgcggaaccctgggtctctggccaccccagccccatagtactggctcagcaagtggctgagggatggccggggctcaggagtccggctcaggtagtctccaaggatgaccccatccagggcgccattgaggaaggccatggttaacagagatgccttggggtccaaaagcgtaaaggtccgaggggcagagagctggtcccagcagccctcagttcccaggtctggatggctctgggtctgggaacctcggaggaaggtcaggcccaggtttccagccagggtgactgccaggaggctgtccaccatggtcggtggggacttggctttggcatctggcaaggaagcttggacatctggacagccttttgtagcatctggagtgttggctccaatatctgcagtggtgacatctggagagccatccctgagtcctggggaggaggtggctcttacatctggagcaatggccacaacatctggaaaggtatctccagtctcccaaggggcagccatgctgtccaagggcaaatttatgaccctgcgcccttgcagccctgcctccagccccgccagcagaggctccacagccacggtcgagccatcaggtgccagcaccaccccatattccttcccttctcgtacgtcatgtcgggccacctccttggtcaggcctaacagctctgggcttagtgggcagggatccaactctgtagcattgaggctccatgcccccagcaggaagtggtagaggcgattgtgggggccagagtttggagctgacatcagccacgcagaagctgtgtgtctggtcttggcagctggcactttctgctccagctcagccagggcctggatgacagagtccatgagcaggggcagggaggctgcaggaggaaagaatgtgttagcccagccccacccattcctgagcctccttgtattgattccacatctacccaatgctcccagccctccatctgataaccccatgacccccaacactatccttgtgtagatgaggaaagtgaggtacacagactattgcctgttggttaaggagctcagactgtctgtgagtactggggagccatggcagatttatgagcaggacagaggtgtgacgaacctggcattctaagactcctttcttaggcttagatttgtttggctgccataaggaaatggatttttggggtgccaggatagaaaaggggagacagtgtggaggtgagagatgaaggtggcagaaggtaggtagtgacattgcagtggacaaaagtggaagagtccccagatcgtgagagggagagatggatggtcttttgtgatgaattgaagttaaaaattggggatgttagagggaaaggtattttgaaagatgcctgggactggctgtggtggcttaggcctgtaatcccagcactttcggaggccgaggtgagtggatcacctgagatcaggagttcaaggccagcctggccaacaccgtgaaaccccatctctaataaaaatacaaaaattagccaggcatggtggtgtgtgcctgtaatcccagctacttgggaggctgagacgggagaatcacttgaacatgggaggtggaggttgcagtgagccgagattgcgccactgcactccagcctgggtgacagagtgagactttgtctcaaaaaaaaaaaaaaaaaaaaaaatgccagacgcagtggctcacgcctgtaatcccagcactttaggaggcagaggcgggtggatcacctgaggtcgggagctcaggaccagccggatcaacatggcgagactccgtcactactaaaaatacaaaaattagctgggcatggtggcacacacctgtaaccccagctactcaggaggctgaggcaggagaactgcttgaacccaggaggtggaggttgcagtgagccaagaaccccccactgcattccagcctgggtgacagagtgagactccatcataaaataaaataaataaaataaaattaaattaaaataaaataaaataaaataaaatagcctgggaggcagggggaagagcaggatgggcttgtgccatgttggggaaatgtcagtggctgaactgcaaacctagaaatgctaagttaggctcagagctggttcagagatgggttatcaaataatagctaactttcagtaaacatttactatgtgctagctactagtctaggtgacttatatattaataatttaacgcagttagtcttcacaactcttgtgaggtaggtccttttagcccctgtcttagtacattggtgctgctataacagatctctgaggttgggtaatttatgaaaaacagaaatttggccaggtgtgctggcacatgcctgtaatcccagcactttgggaggccgaggcaggcggatcacttgaggtcaggagtttgagaccagcctggccaacatggtgaaaccccgtttctactaaaaatacaaaagttagccgggtgcggtggcgggcacctgtaatcccagctacttggggggctgaggcaggaggatctgttgaacccgggaggtggaggttgcagtgagctgagatcatgctgctgcactccagcctgggcgacagagtcagactctgtctaaaaaacaaaaaaaaagaacagacatttatttctcatagttctagaggctgggaagtccaagatcaaagcactggcatttgggacttcctagcctgcagaactgcaagaaagtaaatttctcttctttacaaatttactcagtttcaggtaccctggcctatatagaagcacaaagggactaagatggtgtccctttacagatgaggcatctgaagcacagagaggttaagttacctgcctaaggtcacacaggaaggaagtggcagaggcaggatttgcctttgttttttttttttttttttgagacggagtcttgctctatcatccaggctggagtgcagtagtgctcagctcactgcaacctcctgagttcaagcaattttctggcctcagcctcctgggtagctgggattacaggtgcctgccaccacgcctggctaatttttggtatttttagtagagatggggtttcaccatgttggccaggctggtctcgatctcctgatctcaagtgatctgcccgccttgatctcccaaagtgctgggattacaggcctggccagtagtagaatttgaatccaggaagtcttactcgacacactctcctggtctagaatctaggttcttctccagtccaccacctaacctgtgtagctttgctcttctctgcaaaaaatgccctttctggcttctcccccaaatcatttctctttcttcctagcctagctcttatgtctcctcctccaagaagccttccctacttttgctctccaggccccagattccttcccttatccttgccttgactctgtggagctgggaatatctatgtccccatgctggagcttctttgagagcttgagtctccagcctcactccatgcagggcaagacatagatgggacagcagtacgccttctgcagagccaagaggtttggtcccaggactctgccccctgactcacctgtccctgggtctgaccacagtagcaatccgagtaggatccagaggacaccctgggccattgttgcaggattccagcttccaaggggtatttctggttggcctcggcagagaacctcggcagtgctggagggagacaggcacagagaactgagcagagcctttgaccactgtcaaagtccagcggcgaatgacagacctgcctctcgtagagctgtgggcgggaggcagcagggacatggggcagcgtaccctgggtcaaggtcatctgggcatcctggtctcccccagtctcttctgtccctcctaggctgaggtcagtggtcagtaagccaggcccatccccagaggggcctggagaccaggtggttcagactccataaactctgcccattctccagtgaggtggaccgaggcaacccctcaagtcctgtccctccccatagtgacggctctgtagccgctgctggccaccagaggggactctcagctgccgcctgctgtactggtaagaccggctgtgttgagggagaggagagaagcagaggcctgaagttggcactgccttctgcttttttttgcaaccaacacttcaggctcaggcacagcatcggtgcgggggctgaggacagtgtttgctgaggcctgaagttggcactgcctcctgcttttttttgcaaccaacacttcaggctcaggcagagcatgggtgcaggggccgaggacagtgtttgctgaggcctgctctgagcccatggggaccaggggctgtcacctctcatccagttccagcccttgatttcaagccaccagcagtagctgagagcaggggttgagcttgagtgttcaggaccctggcattgttccaggagctggcttctggactcacctgggctgacagtgaaatgtccttcctcttctccgggtgcccatgactgagacctgcagaatggacccatctcccctttattctggcatcagatggggcaggttgacatgactgggctgttgtgtatgtaaattgcttccctgtggggctcccacctcaaaaccagcccggggagtttccaggagacccaccagctggagactcagccagggcaggcctgggaatgtccagcctgagccaggcctgggattcccctgggggccacccctggggcctcctcaggtgtcctctttctggggacctcccagaaaaaagctgggcacatagtggaagctcaggatgtagggtgctaagtgatagagtgaatgggggacacttcccatgggagtaagagacaatgtcctcctccaagctcgtttcccaggatttggggataggagctttgcctggtagaaccatatgaaggttgtgggctgaggcagggactaggttgaggcatcctctttgccgcaaaatttaaggcagtgttgaaaatctaagtcatcaataactttttttttttttgagacggagtctcgctctgtcacccaggctggagtgcaatggcacgatctcagctcactacaacctccacctcccagattcaagcaattctcctgcctccctgcctcagcctaccaagtagctcaggttacaggcatgcgccaccatgcctggctaatttttgtatttttagtagagacggggttttgccacgtaggccaggctggtcttgaacccctgactcaggtgatccacccaacttggcctaccaaattgctgggattacaagcgtgagccaccatgcccggccgataaataattttaagacttttttagaacagttttattattattattatttttaaagatggagtcttgatatgctggccaggttggtcttaaactcttggcctcaagcaatcctcctgcctcggcctcccgaaatgctaggattacaggcgtgagccactgcacccagctttattttttattttattattattattttttgaggcagggtctccctctgtcacccaggctggagtgtagtggtgcaatcttggcttactgcagccctgcttcccaggttcaagtgattctcctgcctcagcctcccaaggagctgagattacaggtgcccgtccaccacttccagttaatttttgtatttttagtagagacgggatttcagcatgttggccaggctggtctcaaactcccaacctcgggtgatccacctgtcttggcctctcaaagtgctgggattacaggctttttttttttttttttttttttttgagacagagtctcgctctgttgcctaggctgcagtgtagtggcacaatcttggctcactgcagcctctgcctcccaggttcaagctattctcctgcctcagcctcccgagtagctgggattacaggtccccgtcaccactcccggctgatttttgtacttttagtacagatgtagtttcaccatgttggccaggctggtcttgaactcctgacctcaggtgatccacccgcatcggcctctatttttaattttttatagagatgagggtctcgctatgttggccaggctggtctcatctcctggactcaagggatcctcctgccttagcttcccaaagtgctgggattacaggcgtgagccaccatgcctggcctagagcagttttaggttcgtgacaaaattgagcagaagttacagagagttctactccctgccttgacacatgcacagactctcgtattatcactatccagcaccagaatggtatatctgttacaatcgatgaaccttcactgacacatcattatcacccaaagttcatcatttccattagggtttgctcttggtggtgtacattctatgggtttggacaaatgtataatgacatatgtccaccactagagtgtcatacggagtacagttgacccttgaacaacatgggtttgacctgtgagggtcaacttatatctggatttgtttcaataaaaattacatggactgtgcctgcctctcctctccccttcctcctcttccacctctgccacccctgagacagcaagacccctcctcttcctcctcctcagcctactcaacatgaagacggtgaggatgaagacctttatgatgattctctacttaatgaatagtaaatatacttcctcttccatattttcttccttctcttccttctcctttcttcccttctccttccttccttccttccctccctccccccttcctccctccctcctttctttcttttttctttctttctttcttcctttctttctttctttctttctttcttccttccttccttccttccttccttccttccttccttccttccttccttctttctttctttctttctttctttctttctttctttctttctttctttctttctttctctttcttctctttctttctctttttctctttctttctggcagagtctcattctgtcccccaggctggagtacagtggcgtaatctcagctcactgcagcttccatctcctgggttcaagcgattctcctgcctcagcctcctgagtagctgggattacaggtacctgccactatgcccggataatttttgtatttttagtagagatggggtttcaccatgttgggcaggctgatctcgaactcctgacctcaggtgatccatccacctcagcctcccaaagtgctgggattacaggcatgagccactgcacctggctcgtggattttttccaataagttacatggagtgtgtctgcctctcctctctccccttccacctcctccacctcttccacctctgccacccctcagacagcaagaccaaccccttcccttcctccccctcagcctattcaacatgaagacgatgaagatgaagacctttatgatgacacacttctacttaatgaatagtaaacatacttcctcttccatacgattttcttagtaactcttcttttttcccaggttcaggtgattccctcgcctcagcctccagagtagctgggactacaggcatgcaccaccaaggctagctaagttttctatttttagtggagatggagttttaccacattggctaaactggtcttgaactcatgaccccaggtaatccacctgccttggcctcccaaagtgttgggatgacaggcgtgagccactgcaccccacctgatttccctttaaagcttggagttggggcagagactgccttgttttaagccaggggcatgtcatggatggcaggctctttccttagggtctatgtaggatttgtgaccttctggggcaggacccttcctccagggagcctctgtggttaccccttgctccccttactcctcccagctccctgacctgctgttcttcccttcaacctaggctgtgcttacagtgctggaaggttctttgtccagttttgtctccccaaatctaggagatgctgagtttttggggctgtccagaagtgcccagcacagactcaagaccaagtgagtgtcagggagggattgctaaatgcacaaaaagcctgatgaatgatgtggggccagtttggggtcaggatctgaaacacacacatgtacacccacattcaggcactcacacaccaatgcatcagggctgggctgggcctgggaggcagaaagaaggctggaaatcccacaatgaatcacctctaccccaggtttccttcaacctcaggaggcccacttgtcagataaatcaaggccccttggccgggtgcggtggctcacgcctgtaatcccagcactttgggaggccaaggcgggcagatcacctgaggtcaggagttcaagaccagcctgaccaatatgatgaaaccccgtctctactaaaaatacaaaaattagctggtgtggtggcatgcacctgtaatcccagctactcaggaggctgagacaggagaattgcttgaacccgggaggcagaggttgcggtgagctgagatcgcgccattgcactccatcctgggcaacaaaagcaaaactctgtctcaaaaaaaaaaaaaaaaaaaaaaatcaaggcccctccaggctgcagagagactagaggggtcacaagagtagccactgattatggagcagggccggctctcatgagttgtagcattggcacagataggcagagcctctggccctagatcttaagcaaggctgggatgaggccagaggagaaggaacttggggcagggctgggcttgggctcaacgtcagagtcgacagcgttcactatggtggcactaatgatgctaataatgaagaccccgctcgctactactgttacaggaatggggtcccgatccagaccccaagagagggttcttggatctcgcgcaagaaagaattcagggtgagtccacagagtaaagtgaaagcaagtttattaggaaagtgaaggaataaagaatgactgctccataggcagagcagccctgatagctgctggctgccttttttttttttcagacggagttttgctcttgttgaccaagctgaagtgcaatgacatgatctcggctcactgcaacctctgcctcctgggttcaagcgattctcctgactcagcctcctgagtagctgggattacaggcatgtgccaccacacctggctattttttttttttttgagacggagtctcgctctgtcgtccaggctggagtgcagtggcgccatctccactcactgcaagctccgcctccctggttcatgccatgctcttgcctcagcctcccgagtagctgggactacaggcgcccaccactatacccggctaattttttgtatttttttttttttttttttttttagtaaagacagggtttcaccgtgttagccaggatggtctcaatctcctgacctcgtgatccactcgactcggcctcccaaagtgctgggattacaggcgtgagccactgtgcctggcctaattttttgtatttttagtagagatagggattcaccatgttggccaggctggtgtcaaactcctgacctcaggtgatccttccgcctcggcctcccaaagtgctgggattacaggcgtgagccaccgcgcccagcctggttgcctatttttatggttatttcttgattataggttaaacaaggggtggattattcatgcctcctcttttaagaccatataggataacttcctatcattgccatggcatttgcaaactgtcatggcgctggggagtgtagcagtgcggatgaccagaggtcactcttgtcgccatcttggttttgatgggttgggctggctgctgctgctttttttttttttttttggaggagtttcacttttgtcgcccaggctggagtgcagtggcgcaatcttggctcactgcaacctccactccggggttcaagtgtttctcctgcctcagcctcccgagtagctggaattacaggcgtccgccaccacacccagctaatttttgtatttttggtagacaatgtttcaccatgttggctaggctggtctcgaactcctgacctcaggtgatctgcccacctcggcctcccaaagtgctgggattgcaggcataagccactgcatccggccgtgcaggcttctttactgcgatctgttttattagcaaggtctttatgacctgtatcttgtgccaatctcctatctcatcctgtgacttagaatgccttaactgggaatgcagcccagcaggtttcagccttatttcacccagctcctgttcaagatggagttgctctggttcacaggcctctgacactactaataaaaagtgctgtgtgtggggctctgagctaaggttttatgtgcctgtgcctgtggttattttttttttcctttttttttttttaatcactgggatttgttaagcaatgttctacagcagaagtcagagaacctcagcttatgaactggatgtctgtttttgtaaaactgttttttgaggtgaaattcacctaacacaaaattcaccattttattatttatttttttttttgagaccgagtctcactctgttgctcaggctggagggcagtggcgggatcatggctcactgcagcctcgacctctggggctgaagggatccccgcccccagcctcccaagtagctgggactacagatgtgtgtcatcacatccagctaattttttgattttttgaagagatggggtcttgctttgttgcttggactggtctcgaactcttgggctcaagtgatcctcccaccttggcctcccaaagtgctgggattacaagtgtgagccatcacacctggccaaaatttaccattttaaactgtgtggtttagaggcacttagcatatttacagtgttgtgcagttgtcacctctatctagttctaaagaatttgcatacccctaaaagaaaaccctgtcctcatcagcagtcattcctcattcacccttcccctgcccctggcaaccacaaacctgctttctgtctctatggattcgcctgttctggacatttcagatcaatggaatgtcacactatggccttttgtgtctgtctttttttttttttttttttactcagcatcatgttttcaaggttcatcatcatagcctggatcagtgcttcattccttttcagggctgcataatattccattgtgggaaatgatcacgatttgtttaggtgattgaatgtttattggaacacacttccttccattcatttacatttctatggctgttttcctgctataatggctgagtcacaaagcagaaactattgactatctggccttgtccgcatcagcagtcactcctcattccccctcccacagcccctggcaaccacaaatctgctttctgtctctatggattcgcctgttctggacatttcagatcaatggaatctcacactatggccttttgtgcttgtcttttttttcacttagcatcatgttttcaagcttcatcgttatagcctggatcagtgcttcattccttttcagggctgcatagtattccattgtatgaaaggatcacaaattgtttaggtgattgaatgtttattggaacacattcccttccattcatttacgtagctatggtggctgttttcctgctataacagctgagtcacaaagcaaaacatatttatttactatctgggctttttttttttttttttttttgagatggaatctcgctctgtcgtccaggctggagtgcagtggtgtgatctcggctcactgcaacctctgcctcccaggttcaagcaattctcctgccctgcctcagcctggctcttttttttaattctttttttttgagacagagtctcactgtgtcacccaggctggaatgcagtggcacgatctcggctcaccacaacctcacctcctgggttcaagtgattctcctgtctcagtctcccaggtagctgggactacaggcatgtgctaccatgcccggctaattttttgtattttttttagtagagatggggtttcaccatgttagccaggatggtctcgatctcctgacctcgtgatccgcccgccttggcctcccaaagtgctgggattacaggcatgagccaccgtgcccggcctatctggccttttaatacaaactttgctgacccctgccgagccagcccgcctggattcaaatgcctatgctgctgcttactggctggagaaggtggctttatctctagtcttcattttgtccatctctaaaatggaagaatagtaccaactgcaaagggtgactgttagggttaaatgagttgatacttgtataaagtgcttaaaacagtgcctagcatggctgagtgtggtggctcaagcctgtaatcccaacactttgggaggctggagtgggcggatcacctgagaccaggagttcgagaccaccctggccaacatagtgaaacctcatctctactaaaaatacaaaaattagccaggcgtggtggtgtgtgcatataatcccatctactcaggagtctgaggcaggagaattgcttgaacccgggaggcagaagttgcagtgagccgagattactccactgcattccagcctgggcaacaagagtgaaactctgtctcaaaattaaacaacaacagcaaaaacaacaaaaatcccacacacacacacacacaaaaacacgtggaatgcacttgatgagtagggagtagaggatggtgatgtcctcggttcctgttgtcccacccgcctgccccagcctccccagcaaatgtttagcccagcccatgggaaaaatccatttaattattgtcatggctggattcccatctcctagaggagtccagactcatagtcatgcattatttctccatctggggcacctgtccaagcccaaggcttccctgctggcccctggtcttccagtagccagctgggccttagggctgggcctggagccgatctggaaccacagccaaatcatgaaagccaaggtcagccagcccccaaatcagtcgagcccaattcactaaaaagagactcaagtcatgacatgagccagcgaccgtgcggcccccagctggggcttttctgccattcccagtgggcagaagttgacttcaattgcatctttctgggacatcagaggtgagatttaatctctcaggcaactggtcctggaactggggaggacggagtttagtaatttgagatgtgggatactgtagagatatggtgagcttagctcttgccagtatgcgaggggccaagactgagtgtggggggatggggccatatcttagcgcttcctggtggaatatttacagagcacacacgggctcttagctgtcatcaccctgcttcagagaatgacacagggcaaagggctttaaacatatcttctatagaaaatcccaaacatattcaaaagtagagagaattgtaaaaaacccctacgcataccgatcaccgaattgacatcttcaaatcacaattcatcttgtttcttctatactccacccattgtctctcttttgtgatattatctgctgttgacgatcattgccaggatctattaattcattagtaggaataacataatgacatttgagtgataatattcctccttcatgtattagctgaaatacttctttttattattattattatactttaagttttagggtacatgagcacaacatgcaggtttgttacatatgtatacatgtgccatgttggtgtgctgcacccattaactcgttatttagcattaggtatgtctcctaatgctatcccttccccctcccccgaccccacaacagtccccagtgtgtgatgttcccattcctgtgtccatgtgttctcactgttcaattcccacctatgagtgagaacatgtggtgtttgtttctttgtccttgcgatggtttgctgagaatgatggtttccagcttcacccatgtccctacaaaggacatgaactcatcattttttatggctgcatagtattccatggtgtatatgtgccacattttcttaatccagtctatcattgttggacatttgggttggttccaagtttttgctattgtgaatagtgccacaataagcatacgtgtgcatgtgtctttatagcagcatgattgataatcctttgggtatatacccagtaatgggatggctgggtcaaatggtatttctagttctagatccctgaggaatcgccacactgacttccacaatggttgaactagtttacagtcccaccaacagtgtaaaagtgttcctatttctccacatcctctccagcatctgttgtttcctgacttttgaatgattgccattctaactggtgtgagatggtatctcattgtggttttgatttgcatttctctgatggccagtgatgatgagcattttttcatgtgtcttttggctgcataaatgtcttcttttgagaagtgtctgttcatatcctttgcccactttttgatggggttgtttgtttttttcttgtaaatttgtttgagttcattgtagattctgcatattagccctttgtcagatgagtagattgcaaaaaatttctcccattctgtaggttgcctgttgactctgatggtagtttcttttgctgtgcagaagctctttagtttaattagatcccatttgtcaattttggcttttgttgccattgcttttggtgttttagacatgaagtccttgcccatgcctatgtcctgaatggtattgcctaggttttcttctagggtttttatggttttaggtctaacatttaagtctttaatccatcttgaattaatttttgtataaggtgtaaggaagggatccagtttcagctttctacatatggctagccagttttcccagcaccatttattaaacagggaatcctttccccatttcttgtttttgtcaggtttgtcaaagatcagatagttgtagatatgcagcattatttctgagggctctgttctgttccattggtctatatctctgttttggtaccagtaccatgctgttttggttaccgtagccttgtagtatagtttgaagtcaggtagcatgatgcctccagctttgttcttttggcttaggattgacttggcaatgtgggcttttttttggttctacatgaactttaaagtagttttttccaattctgtgaagaaagtcattggtagcttgatggggatggcattgaatctgtaaattaccttgggcagtatggccattttcacgatattgattcttcctacccatgagcatggaatgttcttccatttgtttgtatcctcttttatttcattgagcagtggtttgtagttctccttgaagaggtccttcacatcccttgtaagttggattcctaggtattttactctctttgaagcaattgtgaatgggagttcactcatgatttggctctcagtttgtctgttattggtgtataagaatgcttgtgatttttgcacattgattttgtatcctgagactttgctgaagttgcctatcagcttaaggagattttgggctgagacgatggggttttctagatatacaatcatgtcatctgcaaacagggacaatttgacttcctcttttcctaatcgaataccatttatttccttcttctgcctgattgccctggccagaacttccaacattttgttgaataggagtggtgagagagggcatccctgtcttgtgccagttttcaaagggaatgcttccagtttttgtccattcagtatgatattggctgtgggtttgtcatagatagctcttattattttgagatacgtcccatcaatacctaatttattgagagtttttagcatgaagggttgttgaattttgtcaaaggccttttctgcatctattgagataatcatgtggttttggtctttggttctgtttatatgttggattacatttattaatttttgtatgttgaaccagccttgcatcccagggatgaagcccacttgatcatggtggataagctttttgatatgctgctggattcggtttgccagtattttattgaggatttttgcatcaatgttcatcaaggatactggtctaaaattctctttttttgttgcctctctgccaggctttggtatcaggatgatgctagtctcataaaatgagttagggaggattccttctttttctattgattggaatagtttcagaaggaatggtaccagctcctccttgtacctctggtagaattcggctgtgaatccatctggtcctggactttttttggttggtaagctattaattattgcctcaatttcagatcctgttattggtctattcagagattcaacttcttcctggtttagtcttgggagggtgtgtgtgtcgaggaatttatccatttcttctagattttctagtttatttgcatagaggtgtttatagtattctctgatggtagtttgtatttctgtgggatcggtggtgatatcccctttatcattttttattgtgtctatttgattcttctctcttttcttctttattagtcttgctggtggtctatcaattttgttgatcttttcaaaaaaccagctcctggattcattgactttttgaagggttttttgtgtctctatttccttcagttctgctctgatcttagttatttcttgccttctgctagcttttgaatgtgtttgctcttgcttctctagttcttttaattgtgatgttagggtgtcaattttagatctttcctgctttctcttgtgggcatttagtgttataaatttccctctacacacttctttgaatgtgtcccaagagattctgctatgttgtgtctttgttcttgttggtttcaaagaacatctttatttcgttatgtacccagtagtaattcaggagcaggttgttcagtttccatgtagttgagcggttttgagtgagtttcttaatcttgagttctagtttgattgcactgtggtctgagagacagtttgttataatttctgttcttttacgtttgttgaggagagctttacttccaactatgtggtcaattttggaataggtgtggtgcggtgctgaaaagaatgtatattctgttgatttggggtggagagttctttctttcttttcttttctttttttttttgagacgagtctcgctctgttgcccaggctggagtgtagtggcacgatctcggctcactgcaacctccgcctcccaggttcaagcaattctttgcctcagcctcccaagtggctgggattacaggtgctcaccaccacgcccggctaatttttttatatttttagtagagacggggtttcaccatcttggccaggctggtcttgaactcctgaccttgtgatccacccgccttggcctcccaaagtgctgggattacaggcatgagccaccgcgcccagcctcggggtggagagttctgtagatgtgtattaggtctgcttggtgcagagctgagttcaatttctggatatccttgttaactttctgtctcgttgatctgtctaatgttgacggtggggtgttaaagtctcccattattattgtgtgggagtctaagtctctttttaggtctctaaggacttgctttatgaatctgggtgctcctgtattgggggcatatatatttaggaaagttagctcttcttgttgaattgatccctttaccattatgtaatggccttcttttggtctttaaagtctgttttatcagagactaagattgcaacccctgcctttttttgttttccatttgctcggtagatcttcctccatccctttattttgagcctatgtgtgtctctgcaggtgagatgggtttcctgaatacagcacactgataggtcttgactctttatccaatttgccagtctgtgtcttttaattggagcatttagcccatttacatttaaggttaatattgttatgtgtgaatttgatcctgtcattatgatgttagctggttattttgctcattagttgatgcagttctatagaaagaaacagtctcggctgggtgcggtggctgacgcctgtaatcccagcactttgggaggccgaggtgggtggatcacctgaggtcaggagttcgagaccagcctggccaatatggcctactaaaaatacaaaaattagctgggtgtggtggtgcatgcttgtaatcccagctactcaggaggctgaggcaggagaattgcttgaacttggtgggtggaggttgcagtgagctgagatcacgccactgcactgcagcctgggtgacagagcgagactctatttcaaaaaaaaaaaaaaaaaaggaaagaaacagtctctcatcttccatttggttacccagtggtaccattcatatgggaaaggcaagatgagcacttgattcttgttcttttctagtttatttatttatttatttatttgagatggagtttctctcttgttgcccaggctagagtgcaatggcatgatctcagctcactgcaaactctgcctcccaggttcaagcgattctcctgcctcagcctcccgagtagctgggattacaggtgcccgccaccatgcccggctaatttttgtatttttagtagagacggggtttcaccacgttggccaggctggtctcaaactcctgacctcaggtgatctgcccgcctcagcctcccaaagtgctgggattacaggcatgagccaccccgcccggcccgtttatttatttatttatttatttatttatttatttatttatttatttatttttgagacagagtctcgctctgttgcccaagctggagtgcagtggcatgatctcggctcactgaaacctctgcctcccaggttcaagtgattctcctgcctcagcctcccgagtagctgtgattacaggcacctgccaccacacccggctaatttttgtatttttagtagagacggggtttcaccacgttggccaggctggtctcgaactcctgatctcaggtgatccaccggcctcggcctcccaaagtgctgtgattacagacataagccactgcgcctggcccgtttatttatttttatttatttatttatttttgagacggagtctcgctctgtcgcccaggctggcatgcagtggcatgatctcggctcactgcaacctctgccttccgggtccaagcaattctctgcctcagcctcctgagtagctgggactacaggtgcgcaccacctcggctaatttttgtatttttagtagagatggggtttcaccatcttggctagtctggtcttgaactcctgacctcgtgatccacccgcctcggcctcccaaagtgctgggattacagacatgagcgcccagccttgggtcccttaatatcctcaaaaagtaaacactgagattttttttcccttatagatttacgatctcattaaactaatgaaatatgtcaatacattgcagtttttatcattactgataatcaaattggcttccttctttggctggtgggagtctctttatgttgactcctgtgttcttttggcatggctcagagtcctaggtggctttcttgcttcatgacataacaagatgttctaaccagatgctgtgggaacatcttgttcatttcctgccacaggcctgggatcagcaatttctcccaggaacccttattcctttgattggaaaatgaggaatcagctccacaatcaaggagctgaagtgctcatggctaataagttagttttgtttctaggtattttcactggacacaaatagaaaatcccccactattttttttttaaagacggagtcttgctctgttgcctaagcaggagcgcagtggcgccatctcggctcactgcaacctccacctcccgggttcaagtgactctcctgcctcagcctcccgagtagctgggactacaggtgtgcatcaccacgcccagctaattttcgtatttttattagcgacggggtttcaccatgttggccaggatggtctcgatatcttgacctcgtgatctgcccacctaggcctcccaaagtgctgggattacaggcgtgagccactgcaccagccccccacctattttttctttttgagaggcggtctccatcacccaggttggagtgcagtggtcccatctcggctcattgcaacctctgcctctcaggctcaagtggtcctcccacctcagcctcccaagtaactgggaccactggcgtgccaccatgtccagctaatttttgtatcttttgtagagacagggtttcaccatgttgcccaggctggtcttgaactcttgagctcaggtgactgcccacctcagcctcccaaagtgctgcgattataggtgtgagccaccatgtctggtctcccactacctttttttttaattttttaaaaatatatataacatgggccaggtgtggtggctcacacctgtaatcccagcaatttgggaggccgaggcaggtggatcacctgaggtcaggagtttgagaccagcctggccaacatggtgaaaccccacctctactaaaaatacaaaaattagccgggcatgatggtgggcacctgtaatcccagctactcaggagcctcaagatatatatatatatatgaaatgagtttgtattgatgcttccaattcatattttggactaaatgccttttatttagcctgatcaatttgatacctgcatttttattttcccacactgaaaatccaaattctcaccaccaccaacacattcactcatttgctttattccacaatacacacacattaatcccagaagaacacaccaacagtatcttaagtgatatggttatgggaaacagtttaacatttttcccctgtcccttttcattttggtatattccactagggatgtaccattaaattactgagctaaaatactttctttctgattggttatgccggtaaccagaagtgtttaatttctagggccttttttttgagtgtagaaagtatttactttaaaaatagctacaatactcgggaggctgaggcaggagaatggcgtgaacccgggaggcagaggttgcagtgagccgagatcgcgccactgcactccagcctgggtgacagagtgagactctgtctcaaaaaaaaaaaaaaaaaaaaaattacctacaacaataaaaacaacatctcacaataagattgtgcattataactgcaactattaatagaaccactgttcaattagaaaatacctgaaatagggctgggtgcagtggctcatgcctataatcctagcactttgggaggctgaggcaggtggattgcctgagctcaggagttcgagaccagcctgggcaacacggtgaaaccctatctctactaaaatacaaaaaattagcggggcttggcggcatgcgcctgtaatcccagctactcaggaggctgagacggctgaattgcttgaacctgggaggtggaggttgcagccagccgagattgagccattgcactctagcctgggcgacagagcaagactccgtctcaaaaaaagaaaaaaaaaaaagaaaagaaaatacgtcaaataacaggattaataatgtcataataacaattatcattaatctattattatttattattattatttttgagacagagttttcgctcttgttgcccaggctggagtgcaatggcacgatctcggctcaccacaacctccgcttcccaggttcaagcgattctccttgctcagcctcccgagtagctgggattacaggcatgcaaccaccatgcttggctaattttgtatttttagtagagatggggtttctgcatgttggtcaggctggtctcaaactcccgacctctggtgatctgcctgcctcggcctcctaaagtgctgggattacaggcgtgagccactgtgcccagcctgttattattaatattatcgttaatattaatctgttactattgcaaacttcacctattacctccatcccccacccccatttaaaaatgtcattataaatatagtaccttaggccaggcacagtggctcaggcccataatcccagcactttgggaggccgaggggggtggatcacctgaagtcaggagtttgagatcagcctggtcaatatgatgaaacctcgcctgtactagaaatacaaaaagtaaccgggcatggtggtgcatgcctgtaatcccagctactctggaggctgaggcaggagaatcgcttgaacccagcagtgggaggttgcagtgagccaagatcgtgacactgcactccagcctgggcgacagaacgagattttgtctcaaaataaataaataaattaaaaaataaaaataaaaaataaataaatatagtaccttaccacatgcagctttgagttactgggtcattcagacgaagtaataccacattacttttttactgtggtaaaatacacataacatacaatttaccattttagccatttttacgcgtacagttctagggcactgagtacattcacgttgtgcaaccatcaccaccagccatctccaaaactttttggcttccccagctgaaactctgtccccgttaaacattaacttcctattccctactccccgccaagcccctggcaaccatcattctactttctgtctctatgaatttgactgctgtagttacttcatatcaatagaatcatacaatatttgtccttgtgactggcttatttcactttcctataataagataaacgcatatataattcagccagatattgccagttttctctccccagggattactttgcattctccattagttaagcatgtgagtgtgtaaaatactcccaagccttttcatttgacctggcagactcctatatattctttaaaacccacctctggctgggcgcggtggctcaagcctggaatcccaacaatctgggaggctgagattaataagggaatttacacaacactttcctgaggacagaccacgttcacacctacctccctgttggagcctcaggaccaccttaagagggaaggaggaggaccactcccattttacagttgagaaaaatgaagcacagagacgctaagatgtgtacctaaggccacagagctggtgtcagagccaggcctagatacctacctgcctgcttttcctgaaggggaattcttattaacagagggacaaggttgcttctgataggctgtaggagccggggtgcagtagggggtgggggtggggggaaggggagggaagaatctgattggccgaggaaccaaaaagtggaagtagttggtagggtgggtagacaagcaaagtctgattggctggaaagtaggatatggaagtctgattgggtgagagttaagagagtagtttaattgactaaggcagactctgattgactgaggggttggagagcagcgtttagttgcgggagggggaagagggcggagtctaatcggatgaaaaacaggagactggggtttgattgactgagggatatgagagcatttaatttgctgaggtgtgggagggtggaatctgattggctgggggaaactcagcatgaagtttccccgggggtgttagcaatgtcatttctgctctccttcacaaatcccgtgtctctgggccctggtagaaggaggtggagattaatctcctaggactatggggaaatggaggcagatgtgtgtggaggaggggagggggctgagtcactccaggcaaaggccagagaggacacctccccaaccatacctgctgagaaagaatcttgttctccacctcccatcacgcctcctgcagagtgaccactaggatttatggcccagaagagagaggtgtcacccagcccctctataattcccagggaggaagcaggggtcctcttcattccttccccttccccagcagaaccccttctccccaatcctttcccttcctaggggaccacactcttcatctctctagtttctgatgacaaggacctctcctccctccacctgcctgcccaaaggcatcttcttgcacccactgagtttttttgttttttgttttgggacggagtctcgctctgtcgcccaggctggagtgcagtggagtgatctcggctcactgcaacctccgcctcccgggttcaagcgattctcctgcctcagcctcccgagtagctgggactacaggcgcctgccaccacacctagctaatttttgtatttttagtagagacggggtttcaccatgttggccagtatggtctcaatctcttgaccttgtgatcctcctgcctcggcctcccaaagtgctaggtttacaggcgtgagctacctcgcccggcccccactgcgtttttatcgctattgtcttcctccaccgggagcttctctcccctcccttcctccaccccaatcttcctgtttgactgtctttatctctcttccttcacccttcttcttctcttctactcactccgttaaaaactccagcctaggccaggcacggtggctcatgcctgtaatcccaacactttgggaagctgaggcttgagcccagggcaacatagtgggatcccccctgcccatctctacaaaaaaattaaaaaattagctgggcgtgttggtgagcgcctgtagttttagctacttgagaggctgagatgggaagattgcttgagcccaggaggtcgaggctgcagtggactatgtccgcaccactgcactccagcctggatgacagagtgagaccctatctcaaaaacagaacaaaacctccagcctaaatgatgcccaggtggaaaaccttggagttacatccagtctgtcagcaaatcccatcagctccaccttttattaaacaaatcccaaactctaccacctttcacaactctaagttccttcagggttgggcagtgaggaagcaagctcttgctccccgtttactctgttcatgatattgcagccagaggaagcctgttaaaacctctcaggggacatcccttctctgcctagaaccctgtatggctcccaccttcctcagagtaataacctaagccctctcagtggtcccccaggtcctagacaacctgtcctgtcacttccctgcatttatctcctcccggtatccccctcactcactctgctgcagcttcactggcctcttgactgttctttaaggcatggtccagcctcaggtcctttacacaggctgtgccctctgcttggaatgcttaagatccctgttcaaatatcaactcctcagagagggcttccacatctccttaccttgctaggttttgtcccatagcacatatcacatagattatacacttttaatttatgtgtttttgtttattcactgcagagcaatgcctggtaccatgtgcaaacttggcatttgttgaatgaatatgtgctatgtgacagctggggctggggacaaggcagagaaagagaaagatcccttttacctgcgtggagtttacagccctatccagggctaaacaaatcattccaagaggcaggcacggtggttcatgcctgtaattccagcactttgggaggccgaggcgggtagatcacctgaggtcaggagttcgagaccaacctgatcaacatgctgaaaccctgtctctactaaaaatacaaaattatctgggtgtggtggtgcatcccagctacttgtgaggctgaggcaggagaatcacttgaactcgggaggtggaggttgcagtgagccaagaccgcgcattgcactgcagcctgggcagcaagagcaaaattctatctcaacaaaacaaaacaaaacaaaaacaaaacaaaaaaatcattccaagagcaattttactgggagcgaggacactcaggggctgtggctgcattgagtatgggctggaactaagcccagtgactggggaagccctcagaaaaaatggccttaagtaggagttagttgggtgggtgagaggaagataattccaagcagagagaagagcatgtgcaaaggatttaaagttggagagatggtctttgatgggtttggcaaaaatggtcccaagtggcttgtgtgtggatggggagaaggaaagtggccagcacatgttaaaaggggccatttaacaccccacttgcctctcacctttgaattgctttccttccttccttccttccttccttccttccttccttccttccttccttccttcctttctctcgctctctctctttttttcttttttttttttttcggagttttgctcttgttgcccaagctggagtgcaatggcatgattttggctcactgcaacctccacctcccaggttcaagcaattctcctgcctcagcctcccaagtagctgggattacaggtgcgtgccaccatgcccagctaattttttggtatttttagtagaaacggggtttcaccatgttagccaggctggtctcgaactcctgacctcgggtgatctgcctgccttggcctcccaaagtgctgggattacaggcatgaactaccatgcccagctgtgttgctttctttgtttgaaatctctgatatcacctgttctgtttccacttttctgcctcactgtttttgtgtcccaggaggctgatgtatatggaccactcaatgagctcctttgtcttgtggcttccagttgggttgaaacagcagggagccatagcaggcattggagggagggaggaaagtgaggttaggttatttgtaactcatcttctttccatgcaggctggctgtgtccctccaccggaggttcagaactcttgacaggtggacctctttgcatagccctgtctggtccaggttctagcaactttagttccttggccccaggtcctaggggtggtaactaatttcagctgttaccagcccctggtgtgctgcactatccctttgaaaatagtgctttttattaaactctctacaaattactccacttaagtgttcggtctgtttcctgccgagttcttttttatttttattttttttgagatggagtctcactctgtcactcaggctggagtgcggtggcacgatcttggctcactacaacctctgcctcccgggttcaagtgattctccttcctcagcctcccgaatagctgggactacaggcgtgagcccccatgcccggctaatttttgtatttttagtagagacagggtttcaccatgttgacgaggctggtctcgaattcctgagctcaggagatctgcccgcctcggcctcccaaagtactaggattacaggcataagccaccgcgcctggccctcttttgtttttagagacagggtctcactctgttgctcagactggagtgaagtggtgcaattgtagctcactgaaacctcaaactcctgagctcaagcaatcgtcccacctcagcctcctgagtagctgggactacaggcatgtaccactatgcctaatttgttattttttataatttttacaaaaaattattttttttagagatggggtctggctatgttgctcaggctggtcttgaactcctggactgaagcaatcctcctgcctcgacctcccaataataataattatatatataattattatatatattatatataataattattatatattatatatatataattattatatatatataatatatatatatataaagtatttattttaattgaggtgaggccgggcacagtggctcatgcctgtaatcccagcactttgggaggctgaagagggaggatcacttgaggccaggagtttgagaccagcctggcgaacatggcaaaaccccgtctctactaaaaatataaaaaaattagctggctgtgtgtcacaggcctgtaatcccagctacttgagaggctgaggcacgagaattgtttgaacccaggagccggagtttgcagtgagttgagatcgcaccactgcactccagcctgggcaacaggtgagactctgtctcaaaaaaaaaaaaaaaaaaaaaaaaaaattgaggtgaaattcacataacataaaattaaccctttaaagtgtagaattcagtgacatttagtgcattcacaatgttgtgcaactatcacctttatctagttccagtgtttttgtcaccccaaaaggaggtcctataaccactccccctgggtatgggcttctctctccatcccccctcccccagcccctggcaacaactactccactttctgtctctgtgaattcacttagtctgaatatttcatataaatgtaataatgcactgtgtgaccttttgtgtctggtttctttcactcagcacaatgtttatgaggctcatccacattgcggcatggatcagggttttatttatttttatttgtattttttttttcagacggagtctcactctgtcccccaggctggagtgcagtggtgcgatcttggctcactgcaatctttgccttccgggttcaagcgattctcctgcctcagcctcccgagtagctgggattacaggtgcccgccaccgtgcccagataatttttgtatttttagtagagacagggtctcaccatgttggccaggctggctcaacctcctgacctcaggtgatccacctgcctcggcctcccaaagtgctgggattacaggcaagagccacctcgcccggcctttattcttttttatgactgagtaatattccattgtatggatggaccacagtttgtttatccattcatctgttggtggaatttgggttgtttccacctttggctataataaatcgtgctatcccgagcactcctctacaattacgtgtgagtaactgttttcttttctctttctttctctttatctctctctctctctctctctctctctctctctctctgtctcttctttctttctttttctttttttttgagacagggtctcattctgtagccaggctggcgtgaagtggtacaatctcagctgactgcaatctcagcctcccagtctcaagctgtctatcctcccacctcagcctcccaagtagctgggactataggtacgcacatcatgtccagctaattttttatattttgtagaaatgaagtcttgctatgttgttccccaggctagtctggaactcctgggcttaagtgatgctctcttgcctcagcctcccaaagtgctgagatgacagctgtagaccactgtacctggcaagtacttgttttcagttattgtgtgtgtatacctaggagtggaatatctgggtcctatggtaattctgattagctttttgagaaattcccaaactgttttccactgtggctgaaccattttacgttgccaccagcagggtatggcgagatccctcttctttttatctttgactccctgccatgacctgccacatccactcccagacagctttctactaccatttcccaagtccagccacagcctccacttcctcccctcccacttcaacctcaccccactgagccctgggctgtggcaggctgagggctctggtggcatgggaaccacacagctctagagcttgggttccttgacgtctaggtgccagtgatggtccctactaccactcttctcaaactccatctccagctccagctcagtgctgctgcctgtcctctctataaatgtagctattatctctgaggtcaggagtttgagaccagcctggccaaaatggcaaaaccctgtctctactaaaaatacaaaaattagccgggcgtggtggtgcaagcctgtaatcccagctactcaggaggctgaggcaggagaattgcttgaacccgggaggtggaggttgcagtcagccaagatagcaccactgcactctagcctgggtgacagagcaagactctgtttgattaaaaaataaaataaaaggccaggcacggcagctcatgcctgtaatcccagcactttgggaggccaaggcaggtggatcacttgaggtcaggagtttgagaccagcctggccaatacggcgaaaccccgtctctactaaaaatacaaaaattagccgggcttggtggtgggcacctgtagtctcagctactcgggaggctgaggcaggagaatcgcttgaccccgggaggcggaggttacagtgagccaagattgtgccactgtatccagcctggacaacagagcaacagagtgagactccatcttaaaaaaaaaaaaaaagtggctgtgatccccacttctgccctcccctcctcttctctgcccacctccctcctgagtgatctcgctgacctactgccatgccatccaccgtcttcccaaggcaggtgactcacagatgcaattctcaggaggtgccctcacgctgagcccaactgcctcctggatgtctccctgaatgtcatcccatgagacccacgagacttttagactgaaggtgacccacggtttcccaatcttagcactgtcaacatttgagcctggattattctttgggggtgggggtgttctggatgttgaataatatctctggccttcacccactagatgtcagttgcaccaccctgaattcccccacccccacctctaccccccacccagcagtatgatctcctgatgttgctaaacattccctggcggaaaactctactctgctgggatggccccaatcaactgcaaactcaaacagctgatgtttgtccagcctgtgccctgtgccaggagtggggctgaacaccacctcatcacatgggcttcttctgcattttatgcatagggagatggaggctcagagcagccatgtgactagctcaaggccacacatccacgaagcccactcttagtgctccaggccctttcacttactcctccttcctggtctccagctctttgagagcagagaagccaggcagatggcttcttttccttctctcttccctagaaccccgtatttagccagtggtcagtggagatgacctccgggacctcatccttaaccccttcctgggtctcagctacccccaccctttgtctctgtcccctgcagccactggaggggtccctctcaaacttcactctatgtggatctctgcattttccaaagtgcttctagtaagctcccccttggccagaattactggcaaaacaaaattcatatccctaaaaaataggctttcatgctgcgttaattatgaataaaaaattaataaaataagctcttcctcagaagtaaaaaagattaaagacacaaataaatataaatatttttttttaaaagttctaggagctgggagaatggcttgagcccaggagtttgagaccagcctgggcaacatagtgagaccctgtctctaaaaaaatgaaaaaaaaaaattagctgggtgtggtggcacgtgtctgtagtcccaactacccaggaggctgaggcaggaggatggcttgagcccaggagtcaccccagcctggatgacagagtgagaccaatcaactaacagggggcacctcccctactcaagcaccatccatggctccccactgcccaccagatcaagatccagccattcaaactggccttcacagtcaactcctgcatccctccagcctccacacctctcacactccaaggccagggaaagccatctgctaagtcacaccctccagtttctctgtgcttgagctctaccccctctcctgcacttgttgaaatccaacctctccatgcagtcccagctcaagtgtcacatcctccacgtcgccttccctgacctcatgtctgcctcctccaagcagcaaaacttcaattacttgtgtctcctcttcttcaccaggagacatgccccacacctcccacgccctctttccaagggcccagcaccaaatgagagcgtattcttagaaaaaagagggataaggaagtcttctaagtttaccacctgctggggcaagtggagattcttgtcttctcatctgtctgcccacgtgctaaggtcagccacacatccacccaccgactccggaggacagacacatccagaggcggagctgactctgtctccacacatctggagtagacgggttggccaaggacaacatcctggtcagagggtcaaggtgtctggcagtgggtggggaggagtggcggagggcgggttggcggggagcagaaccagtctggtgctgcttgttgaggttggaggtcttcctggaggaagaggctgcagagcctccaggggtgggtgccggggaagcttaggcccaggatccagagagaggggaagggctggttcccaagggctggtggagccagagaattcctgagggccccagaggaggcttctcgggggggtcagtggggccccagggggtgatggtttagagatcgctgtccaagcttgggagcaaacctggaagtaagggccatggggggtgttggtgtgggaggagtgtggtccagagcgggacttgggcgctaatgcggcccagcagtggcaggagggcggggagcctgatggtttgggacttctaggtgtccaagtctctgtctctcttcatctctccatctcagtctcagtctctctctctttccatcgctctccacccctccacacgcctatttcttgttctctccttttctagggggcagcgctggagtccccgcccagaaccctgcgggagcccggggcgggatgtccgggggcggacccctcggcacggccgggcggggttaaagggttgggccgtgggacggcgcggtcagatcccaggtagtggcgccggtggatccggatcgagggcaggaggctgagacccgcgggtgagtgcgcgcgtggtgagggctgtaacctgagcgcggccgcggcgctgcgctggaacccgaggctcgcgcggttcggtgctggcggggcaagggcgaaggtctgcgcgcggcggcgggcggggcgcagccggccacggggacccccccaggacccaggacggggctgcatgcccggggcactcgtggggagaggggcacgtgggtgtgtccccgacgtttgctgcatttgtgagttgttttctttttttttttttctgtgtgcgcctcggagtcctaggcgcatccttttctctgggtatctgtgatgggcagggggcctccaaaagacccctctggtagtcaggacatcccagatgggttcaagccccgccctgggacgcctctttggggctgaatggggattcgccctgagatttcaccactgcacgttgtcttgacggggaggttgtagtacattcaaccgatggggttaggcttgtggttcaactgctatcaggaaccctctgcccatccatgccagacgcagagcccctctatgaaaagacggtgttcttctggccccgagagttggctctgagggttgtgtgaggtcctggggttggtcccaggtgatcttcgtctgatagatgctggaaggaagatgttttctggcctcccaggggcctggcccagcctgggtatgcaagttggccgaggctggccacctggggagtcgcaggctggagaggcctaggctcagggcatctctcctggttcatctgcccgctcacagctcattcatgcactcattgtgagtctcaccgccctgtaggcaaaggagatggccagggctggctgcgtacccgaaattcctcctaccctgtgccccttgctccaccccttatttctaggtcctggagctgtgcccagccagggctggcagcatcaaactccttcttgtgtaactccaaaccccaaagagaaggaacctccccaaatcttccctaccaccctcattttacaggcacggaaactgagggccagagagaagaagcctgtgcctgtggatacccagtgcccagtgggagagctgggatttgaaaaaacaagccctgtttgaccccaaagcctcagtccactttccgatgtccccggcatcaccaaatggcccagcttgggtttctgaacagtaacattaactctggcctggtgtctggcggtgacccaggttggtatctgcagaggggcttggatgacttgagaggcattcagggaatgggacccatctctccttccttccttccttccttccttccttccttccttccttccttccttcctttctttctttccttccttctttctttctttctttctttcttttctctgtctctctctctttctttctttctttctttttttgttgttgttgttgagacagggtctcactttgtcacccaggcaggagtgcagtggcataatcatagctcactgcagcctcgatctcctgggttcaagcaatcctcctacctcagcctcctgagtatggaggactacaggcatgcaccaccactcctgtctactttttgtatttttggtagggatggggtttcaccatgttgcccaggctggtcttgaactcttgggctcaagtgatccacccgcctcagcctcccaaagtgctgggattacaggcatgagccactgcgcctgactcatctctccttgttgataaaacttggacctgattctccaaaccccagatggccaggtcacaataatgaacgtgatggcagcaccaacggtaatgagagatatcattgatcaaaggcttactatgtgcctggaagattgcagccccatgaggtgggtaaatagggcttctgtcttaatggatgaagaaattgaggctcagagaggtgcagacactcacccgaggtcgcacagcaaagaggcagacctttatagaatcttttctgaggctcatgtccaggtgtggccacacttgggatggtgggcagaaacaattacaaccctgcaatggtctagattattagtggttttaaaacttctttttctgccaggatcccctttgggccaaggaaattattagcaaaaggtttgaatatgatcaaagctgcgataggactgtctcctttaccacatttgccaacttggccctgccctcattagtcataaatgactctgaagctctttctcagaaccttagaaatttagagtgctgagtggagactgaagacctagaagccaggctgagtgtggtggctcatgcctgtaatcccagcactttgggaggctaaggctggaggatggtttgagcccaggactttgagaccagcctggggaatatagggataccatatatatatatatatatatatttttttttttttttttgagatggagttttgctcttgttgcccaggctggagtgtaatggcgtgatcttggctcactgcaacccctgcctcccgggttcaagctgttctcttgcctcagcctcctgagtagctgagactacaggcatgtgccaccatgcctggctaattttgtatttttagtagagatggggtttctccatgttggtcaggctggtctcgaactcccgacctcaggtgatcctccctcctcccaaagtgctgagattacaggcatgattacaggcatgagccaccgcgcccagcactatattaattttttttaacaaaaaaattaaaaaaaaattagctgagcatggtggcaggcgcctgtagtcccagctactcaggatgctgaggtgggaggatcactcaagcccaggacggggaggttgcagtgagccaagatcacaccactgcactccagcctgaaggacacagcaagaccatgtctaaaaaacaaaacaaacaaacaacaacaacaacaaaacaacttagaagtcccctctcagctccagccttctggggtctggcactttgggggaatatgtgagtctctggggtaagccagccctctgatgttgaggaagccaaggtggcaccatgaatcagtggggacgggggcaggctgccttgactacaggcttggagtgaaaaggagggctgggatttggggtgatggggccagcgttggggtgctcttccatcaggctcctggctggtcccagcccctgcagttcaagaagaggcatgtatctcgtacctggcgtcggcctgggtccgtgccctccactccttcttgggagcccacacaccttgtataacaagtcctcagtgggtgaacggctgggccaacctgacaaaccagcgcgacctgggcgtgggccgggacacggagccagtcgctggctttcaccaccaccagataatgcgggccctggcagggcagggccacctctaccaaggcgggcctgctggatgagatcgggggccggtgtagatagggagtggacatgccagccgcccacaacattctgagggtgtcacctttgaattgctctcacttctatcaaatagcaataataggagtagtcatcatggctaacattttgtgagctacgtgacaaggcctttccatgcctcatttcactgagccgtcccaaaaaccttagggggtaggtcctgttattatcaacccatttcacagattggcaaagggaggctgatggcagggactgggttcacccaaggctgctaacctagggaataggagagctgagatttgaacccaggcctgttgaagtcaaaagtgaacattaaattaaattaaattaattttagtttttgagatagagtctcactctgtcccccaggctggagtgcagtggcaagattttggctcattgcaacctctgcctcagcctcccaagtagctggggctacaggcatccaccaccatgcccagctatttctttttttcttggtagagacagggtttcatcatgttgcccaggttggtcttaaattcctgacctcaagtgatcctccctcctcagcctcccaaagtgctgggattacaggcatgagccaccatgcctggcctgatttttttgttttttagtagagacggagtctcactatgttgcacaggctggtctcaaattccttggttcaagtgatcctcccatcttggcctcccaaagtgctgggattacgggcatgagccacttcacctggctgatacctttcctccattatctaaactccatagtttacattaggattcactctttgtgtcatgcagtaaactaatgaatttttataattgattcaattttttttgaatgggtgacatgtgctcatggtataggaaaccaaaacgactggaaaagtggatagtaaacttaagtttcccttccacccctgtcccgagttctttcaggccctttccagaggctgccaccatttttcctgggtcctcaaagcttttctctctctctctctctctcttttttgtattaccatttattggtgacaaacactaagttttactcgcattccatgaggagaaaaactccagtgtaaacgatgaatggaggcagtacttaactcgcaggggtaccaggctttccatatggaccacacacagagcctcagtgcacacacttcttttttcatttttatttttttgagacggaatctcgctttgtgacccaggctggagtgcagtggcatgttctcggctcactgcaacctctgcctcccgagttcaagcgattctcctgcctcagcctcctgagtagctgggactacaggcgaatgctgccacgccctgctaattttttgtatatatatatatttttttttttttttttttttgagacagagtctcactctgtcaccgaggctggagtgcagtggcgcgatctcggctcactgcaaactccgcctcccgggttcacgccattcttcagcctcagcctcccgagtagctgggactacaggcgcccgccacctcgcccggctaattttttttatttttagtagagacggggtttcaccgtgttagctaggatggtctcgatctcctgacctcgtgatctgcccgcctcggcctcccaaagtgctgggattacaagcgtgagccaccacgcccagcctaatttttttgtattttagtagagatggtgtttcaccgtgttgtccaggctggttgcgaactcctgagctcaggcaatccgcacccccctcggtctcccaaagtgctgggattacaggcgtgagccaccgcacccggcccagtgcacacacttctgtgtatagtaacacaacatcaaaagcaacacaactgtataaagaaacataggtcatacttttcagccctaatcgagatgtaattaatagtatcgagcactctggaaaatcagtctgcagttttatgtgaactatgtggagatcatatcctgtagtgtagtgaaagctaagtcctcaagagccgtatgtatagacacatgattttcttaaagaatatttaaaatggagatcaaagttcatttgtttaagtcctgtttgcattaacaaaaataaaaataaaataaaaatggaagcaaatgatcatctaaagtttaaaattcctaaattgtccaatttatacaactgtgggagacttattcaaggtttttgaaagtccaggactgtttcagctgaaccatagggcacgtaatttgcatcactgaaatggtgctgggttagtcaatgaaataaaaatgtctaactacatacacgtggatatgatctttgtcggttagattattgataaagtcagtctcagaaaagtttccaaactgtgcgatataattagatacagttgagaaactctcaaatgaaaattttatatagtgtcgtcgggcacggtggctcatgccagtaatcccagcactttgggaggccgaggcgggtggatcacgaggtcaggagttcaagaccagcctggccaagatggtgaaaccccgtctctattaaaagtacaaaaactagctgggtgtggtggcccagctactcgggaggctgaggcagacaattgcttgaacctgggaggcagaagttgcagggagccaagactgtgccgttgcactccagcctgggtgacagagtgagactttgtcttgaaagaaagaaagaaagaaaaagaaagaaagaaagaaggaaggaaggcaggaaggaggaaaattttatatagtgtcataccaataaaaaggaaataatgaaactaagaatacagatcactgttggaagagaaagcagtggtgatggtgtgggcactgcaggaagtggtggggccgtggcacactagaagttaggtcatgctgaataggaagcatttgactttctctggtgcttttagctctggggctggttgaaggcctctctctggtgtggctgtccagggtttgtcccaactaagccagcttgagaaggggtcatgctttcagtttcttctttcacacgggaaaaaaaagaccaaacaggaaggtgcccagggcgtggatctgctggtgccccaggagagccagctggctgggcagcccttcttccccaaaggcagctggtattgcgtagggacagccaggtcaccgagtggccgtcacaacaaaccccagcacagtccagcccggccacagccacctcccctgttgtgttccctgctgctgcccacatcctttacccaccgtctctcggcccactagaggtatcagaaattccaaattttcaaagcagttttaatattttcagtgtatatgttgggattttataatggttcatggccagaaaaggttcagcacctcccacacacagacattgatccatttcctgttcttggcatctctgtactttgttggtccaactcagacagcaactttaaggtgttcagtgcagctggccaggcacggtggctcacgcttgcaatcccagcactttgggaggccgaggtggatggttcgcctgaggtcaggagttcaagaccagcctggccaatatggtgacaccccgtctctactaaaaagtacaaaaattagccaggtgtggtggcgcatgccggtaatcttagctacccaggaggctgaggcaggagaattgctggaacccgggaggcaaaggctgcagtgagctgagatagcaccactgtactccagcctgggcaacagagcgagactctgtcttttttttattttcttttgagatggagtctcgccctgtcacccaggctggagggcagtggcgcgatctcggctcactgcaagctctgcctcctgggttcacgccattctcctgcctcagcctcctgagtagctgggactacaggcgcccgccaccacgtccggctaattttttgtatttttagtagagatggggtttcaccatgttagccaggatggtcttgatctcctgacctcgtgatctgcccgcctcagcctcccaaagtgctgggattacaggcatgagtcaccgcgcccggtcgagactcggtcttgaaaaataaaaaagaaaaagaaaaagatgtttagtgcagccatatcatagcaggactcaacatccttgccaatactatgtgttagatataagagaataagtacattctatgtctttgtactttaaccaagatatttgtactagacatgctcacaggcacatagtacattctacgtccttgtactttaaccaagatatctgtgctggatgtgctcacaggcatgtcccagctcgcagcccatgccctttccttatttggaaatattattgcttttctaagtccttttgtaagcaacttcctcttttcctttgctctctattgcctttacctatttaggaaagttttaaattattagccagtcaggtttaatttagattgtgaggtcttgcttcagccaatggagacaggacacagtagcaaggacaaactgcataagggataaaaattgcttccctcctttgttcaggtgtgctctcgccattattccatctgcaaggagcaccctttatgcagaaagtaaaattgccttgctgagaaaacttattatctgaatgctgatttttacttgcagtaccgaggaacaagcattctatttctgaataaacattttacttataacactatggctgatcagaggcggctgagaggagcaatggataagagatacaaattcattcttgttgtttttggggaagtctttgtattcaacctggaatccctggactctggaaagatagtccacttgctcagaggatctcatgagaggtccatggggtacgtggcctgaagagatgttattctttttttttttttttttttgagacggagtctgttgccaggctggagtgcagtggcacgatcttggctcactgcaacctctgactacctggttcaagcgattctcctgcctcagcctcccaagcaactgggattacaggcacgcatggctgattttttgtattatcagtagagaaggggttttgccatgttggccaggctggtcttgaactcctgacctcaggcaatccgcccacctcagcctcccaaagtgctgggattacaagtgtgagccaccgtgcccgacctcaaatgataattctagggtttccccacagtggctgcactatttttttttgtgggtgccagacagaagtgttcttgtttgagggacaggaggaccccagctgtggaaagtataggacttccccaatgtacctttcatggtggtcttcccatgggcatctggtggacctcttgtcatgattcccattttgtagtggagaaactggaggcttccagagagtgtcccaactggggactcacaacatgtggtcctgcctgggggcagagccaggggttgtttgtcctgggaaggacttcagcccatgtctggtagggggacggggaggtgaagcggacacagggctccacaactcccctctctcaccctccccaagcacccatctccccatgtacccagccacctggagcagggatccctctctagggctggcaccttctcttatcccaattctttcccatttcattcattccagaagacatttcctttgttgagatttcagctgggattttcctgggtgcgagttgggggctctagctgtgatttcactcagaagtcttccagctctctttaaggcttactgggaagatggagtgaatgatagtgaaaatcatcacacataacaggcactcaatgattctttggagagtgatctaggggaggtggctgattgtggtgcaaaggagtggaccatcagggcagagctggggttggaggatgaggagctggtgtgggcacagctgaggaaaggaatgtggatggagggaacagaatgtgcaaaggctctgagacgggaagttgcttggcctgtggaaggagtggcctggagcagcctgaggtgagcaagtgaggaggagggtggtgggagacagggctagaggcatcaacaggggtaagccatgtaggttgttgtggtccatgacaaaaagtctaaatttagctggatgaggtgactcatgcctagaatcccagcactttggaaagctgaggtgggaggattgtctgagaccaggagttcaagaccagcctggacaacatagccagaccccatctctaccaagaatttaaaaattagctgggcatggtggtgcatgcctgtagtcccagctactggggaagctgaggtaggaggatctctggagctcaagagtttgtggctgcagtgagctatgattgcaccactgcacttctgcctgggtgacacagcaagaccctgcctctaaaagaaaaaccgtgataaaaggccgggcacggtggctcacgcctgtaatcccagcactttgggaggccgaggcgggcggaacacgaggtcaggagatcgagaccatcctggctaacacggtgaaaccccatctctaccaaaaatacaaaaaaaaaaaaaaattacctgggcgtggtggcaggcgcctgtaatcccagctactcaggaggctgaggcaggagaatagtgtgaacccggggagcggagtttgcagtgagccgagatcgcgccactgcactccagtctggcgacagaatgagactttgtctcaaaaaaaaaaaaaaaaaaaaaagaaacaaaacaaaacacagaaaaaaaaaaaaaagaaaaaccgtgaaaacaaaagagtctaaatttcatttagagcaaagtggggagccatgggagaattttgagcagggaaggttcatgatctgatttaatttgaggaagatccctctggctgtgtgtgcagaatggacttcttgcagggagaaaggatggaactcaggggaccagtgggaacgggccactgcagtgctggcctgctgtgggttgggatgatggggatggagaatgatgaatggattctgaagatgtttaggatggacaactagcaggacccggcaacagattggatgtggctgaaagggggaggaagagggtgaggtgaatctgagagtctaggagatgcccccagggggatgttcaggagctggctggacctggcagtgctggacactgagacatgggaattgcctttgagataggatttctgaaaccacgggaggggtgagatcctcaggatgtgggcacagaggaaaggggggacaacgtggctcttagaagccccaacatttacaaaccgggtgaagaaagacgggctcaaagcagactgagaatgggatttttttttttttttttgagacagagtctcactctgtcacccaggctggagtgcaatgatgcgacctcagctcactgcaacctctgcctcccacgctcaagcgattctcctgcctcagcctcccgagtagctgggactacaggcgcccgccaccatgcctggttaatttttgtatttttagtagagatggggttttgccgtgttggccaggctggtctcgaactcctgacctcaagtgatccacccgccttggccttccaaagtgctgggattacagatgtgagccactgtgctcagccagaggaggggactttttgaggctgaagtggaggatgggcaggagtgagttcctgaagggctttggatgccaggctgaggggagtagggagccatgcagggtgttagagcataggagtcacaggctgttagaaaggggattgtggtggctggaatgggactgaactgcagccaggtggctcctgggggtggatgtgatgattcatgtgacccctgttggctgaatatgttgactccctctcagcacttttgggcctgccaagatggtaacacccaccccacacccactgaccgggctgcagacgaaaaggtcacactggtgtggacccagagatcatctttttatagtcaccccgaggtacaaacagggaaactgaggaccaggccacatagccaattggtgaggaggcagacatagaatccagatgttcatcgtgtatgtttgtgtctgtgtgtgtgtgcgcgtgcacaagtacatgcatgcatttaaaaagaaagtctcagcccggcgtggtggctcaagcctgtaatcccagcactttgggaggccgaggcgagcagatcacgaagtcagcagatcgagaccatcctggttaacacggtgaaaccccgtctctactaaaaatacaaaaaaaattagctgggcgtggtggtgggcgcctatagtcccagctactcaggaggctgaggcaggagaatggcatgaacccgggaggaggagcttgcagtgagctgagatcgcgccactgtactccagcctgggcgacagagcaagcctccatctcaaaaaaaaaaaaaaaacaaaaactaaaaaaagaaagtctctttccctttttttgctgtttttttttttgagacggagttttgctcttgtcaccatttattggtgacaaacactaagttttacttgcattccatgaggagaaaaactccagcgtaaacaatgaatggaggcaatacttcactcacaggggtaccaggctttccatacggaccacacacagagcctcagtgcacacacttcttttttcatttttatttttttgagatggaatctcgctctgtcacccaggctggagtgcagtggcacgatctcggctcactgcaacctccgcctcccaagttcaagcgattttcctgcctcagcctcccgagtagcgggtactacaggcgaatgctgccatgccctgctaatattttgttttgtttttttgttttttttttttgagacagagtctcgctctgtcgccaggctggagtgcagtggcacgatctcggctcactgcaacctccgcctcctgggttcgagcaattctcctgcctcagcctcctgagtagctgggattacaggtgcccgccaccacacctgactaattttttgtatttttagtagagacggggtttcaccatgttaaccagcatggtttcgatttcctgacctcatgatctgcctgccttggcctcccaaagtgctgggattacaagtgtgagccaccacgtccagctgtgattggcttatttcactgaacaggatgccctcaaggttcaaccctggtgtagcatgtgtcagaatgtccttgcttttgaaggccgaatagtattccattatgtggatggaccctattttgtttatacattcatttgttggtgggtacttgggttacttccaccttttttttttttttttttgagacggagtctcgctctgtcacccaggctggagtgcagtggttcgatctcagctcactgcaacctccgcctcccaggttcaagcgattcctgggcctcagcctccccattagctgtgattacaggtacctgccaccacacctggctaattttttgtatttttagtagagacggggtttcgccatgttggccaggctggcctcgaactcttgacctcaggtgagctgccccctcagcctcccaaagtgctgggagtacaggcatgagccaccccgcccagcctacttccacgttttagtgattatgacttgtgctgctctgaacatgagtgtgcaaatatctcttcgagacactgctttcaattctttgggggtatatccccagaagtagaatggatggattatagggtaattctatgtttaattttaattttttttaagatacaggatctccctatgtcacccaggctggggtgcagtcgcacgatcatagctcactgcagcctcgaacaactgggctcaagcaatcttcccatctcagcctctagagtagctgggatcacagacatgcaccaccatgctcagcttgtttaatcttaaaaggaaccaccagtggccgggcgtggtggctcacgcctgtaatcctagcactttgggaggtggaggtgggtggatggcctgaggtgaggagttcgagaccagcctggccagcatggtgaaactctgtctctgctaaaaatacaaaaattagcccagcatggtggcgggtgcctataatccaagctactcggtaggctgaggcatgagaattgcttgaacccaggaggcggaggttgcagtgagctgagactgtgccactgcactccagcctgggcaacaaaagcgaaactttgtctcagaaaaaaaaaaaaaaaaaaaggaaacaccatatggttttccccagtgcacaacagttccaatttgttcacatcctcaaccacacttattttctgtttttttgtttcagttgcaaccatcttaagactggtcatgtagtctgtattttaagtcataatatccatcccaattgggatctccaaatctgatgatgacccacccagctgttttcccaggaagtgttaactaataaaaatttcacttctgcagctgggcgaggtggctcacacctgtaaatctcagcacttgggaggcagaggtgggaggattgcttgagcctaggaatttgagatcagcctgggtaacgtcatgagactctgtctctacagaaaatagaaaaaattagctgggcatgatggtgtgcacctatagtcccagctactctggaggctgaggtgggaggattgcttcagcctgggaggttgaggctgcattgagccgtgatagtactctttagggtcactatttagcctgcgtgatagagtgagaccctgtctcaaaaagaaatttcacttctttatttttattatttttattttgtttcgagacggagtctcactctatcgcccaggctggagtgcagtggcacgatctcagctcacttcaacctccgcctcccaggttccagctattctcctgcctcagcctcccgagtagctgggattataggcgcacgccaccacgcccggctgatttttgtatttttagtagagatggggtttcaccatgttgtccaggctggtcttgaactcctgaactcaagtgatctgcccacctcggcctcccgaaatgttgggattacaggtgtgagccactgcacccggccaacaaatttcacttctgcatggaaaatgtggtttggcgttggctggcagaagacctaagtgaggcgtggtgtggtggctcatgcctgtaatcccagcactttgggaggctgaggtgggcggatcacttgaggtcaggagttcaagaccagcctggccaacatggtgaaaccccgtctctattaaaatacacaaaaaataattagctggatatggtggcaggtgcctgtaaccccagctacttgggaagctgaggtgggagaatcgcttgaacccaggaggcagaggctgcagtgagctgagatcgcaccaatgcacttcagcctgggcaacaagagcaagactctgtctccaaacaaaaaacaaaaaaactcacaacaagatcccatgagaactcactcactcactatctggaagacagcgccaaggggatggtgttaaccattcatgagaaaccagccccgtgatccaatcaccttccactagaccccatctccaacactggggattccagttcaacatgaggtttgggtggggacacagatccaaaccatatcagattctctgagatgaggctggtactgcccggagcatggtggtgcacggcagatgacaagcccttcctgcctgctcactgttttattaacattatggttacctgactgctttgttttggttccttaggagctggccctaaagcaaggacctgagtgcaagtaatttttttgggaagtaataacagaaaataccagcaaggaagaagacagtgaacccaaaagaattgaaaacaggtactcagataaatacatgtacacacatgttcagagtagcatatttcataatagccaaaatgtagaaacagcccaaatgtctgtccacagatgaatgaataaagaaaatgtggggccaggtgtggtggcatgcacctgtagtcccagctacccaggaggctgagacaggaggatcacatgaggctgggaggtcaaggctggagcgagtcgtgatcatgccactgcactccagcctgagtgacagaaccagaccctgtctcaaaagaaaaaaaaaaaaaaggaaatgtggaatatccatacaatggaatattactcagcagtacaaggaattaagctctgattgatgctacaatgtggatgaacctcaaaaacaggatgccgagtgaaggaagccagacacaaaaggctgcatagcatttaatagatttatatgaaatatccagaatacttaaatccatagagacagaaagcagattagtggtgccaggggctccagggagggagaatgggaagtggctactaacagggatggggttttgttttggcataatgaaaatgttctgaaactagctgggtgaggtagctcatgcgtgtaatcccagcactttgggaggccaaggcgggaggatcgcttgagcccaggagttcgagaccagcctgggcaacatggcaaaatcctgtctctacaaaaaaatacaaaaattagctgggcctggtggcatgcacctgtagtcccagctacttgggaaactgaggtgggaggattgcttgagctggggaggttaaagctgcagtgagccgtgatcatgccactgcactccagctgggtgacagaggagaccttctttcaaaaagaaagaaagaaagaaggagagagagagagaaagaaagaaagaaagaaagagagagagaaagaaagaagtcctgaaactagatggaggtggtagttgcattatatgtaaatgtactcaatgccactgaattattccctttaaaataattaattttgtgttatgcgaatctcatctcaactgaaaaagaagaaaaagaaaaagaaagagggggaaaggacgtggccaatagggagtttccactgtgggcagctggagtttaatctcattggggaagcctagagtgagtgtggaacctatatctcagggtcattgcacccaaggggtgagggagctggggtatttatccaccaatgagcctcagtcattggttgagagctgctcctttgggaggggtgtcttggtttcccagcctgaccggctatgcctgggcagagaatgccctatggtagagaagtcaagagggtggccttgtaaaagtcaaggctgagagcatacgagcagggccccgagtgcatccatctgtccagctggttggagatcatggctgggggatgaagaggtatccttggtgtctggaactcacgtgtgctgggaaccttctgtgcactaggcacaccatgcattaccccatgggtcatcgtcttgtgcatggcaccgaccccctgaccctgtgtgtccccaggatgctgcccatcacagaccgcctgctgcacctcctggggctggagaagacggcgttccgcatatacgcggtgtccacccttctcctcttcctgctcttcttcctgttccgcctgctgctgcggttcctgaggctctgcaggagcttctacatcacctgccgccggctgcgctgcttcccccagcctccccggcgcaactggctgctgggccacctgggcatggtaagtgtggccaggcaggactgggctgggctgggctgggcatgtgcagggtaataggtagggatggtgggcctgctggcttcccacagcctcccaagaatctggttggggctagcagcagatttatatgatggggtatgaggctgaggctcagagagggcaagcagtttacccaaggtcacacaggtgggaggaggcagaactaactttaaagatgaattattttgggaggctgaggtgagaggattgcttgaggccaggagtttgagaccagcttgggaaacatagtgagaccccctctctacaaaaaattcaaaaattatatgggtgtggtggtgcacacttgtagtctcagccacttgggaggctgaggtaggaggattacttgagcttaggagttcgagaccagcctgggaaacacagtgagaccccatctctataagaaaaattacaaaaattagctgagtgcagtggcacacacctgtaatcccagctacttgggaggctgaggcgcgaggattgtttgagcctgggagtttgaggctgcagtgagctatgattgtgccaccgcattctagcctgggtgacctagggagaccctgtctctctaaggaaaaaaaaaagaactctctctataattttatagctatcactgtacaataggtacctttacctttggagtttggaatcccagggcagggttggaggaggagaggggaacacatcctattcccaatgtggttccactcttctcccttgaatgctgtggtcctaggtgaggactcttacccttttattgcattgaatttttttctttttgagacagggtctcgctatgttgcctaggctgatcttgaactcctaagctcaagcaatcctttggcctcagcctgctgagtcctttttaattttgcagatatgtgccaagtatttttccaggcaaatattaactcattcagttctcttgacaattctaggaagtaggtcccatgactagccccattttgcgtggaagattactgaggcacagagaggttaagtagctgaccttaggtcacacagcttgtaagtggcagagctggggttcaaacccagcctgtcaagctctagcctccttgatctcagttctaccctctgatgcctctagtttctgtagttagtttctagatgagataggctagacttttccttttttttttttttttcgagacagtctttctctgctacctaggctagagtgcagtggtacaatcatggctcactgcagcctctacctcctgggctcaagggatcctcctgcctcagcctcccaagtagctgcgactgcaagcctgcaagtgcatgcccccacgcctggctaatttttgtacttttagtagggacagggtttcaccgtgttggccagactgatctcaaacccctgacctcaagtgaaccaccgtgctcagcctccctgtttttagttctactctctgatgcctctactttctggatgagataggctggactttcccttttggacttttctccttcatttcttccatcccttacccctgctcaggccttaccctctactgctggtccatggtccagccccctccttgagttcctacctccagtttcatcccttcggtccgtctcccatcctggccccagagggattcttggattcaaccacatccctgcccctgcttacacaccctccatggctccctattgccattcagaaaaaggctggtgttcaaggcccttttggctccaacctccatcctcctcacttgttccaccatccctccctagctccatagaatcacttcccactcctgtaacaaggctcccacctccaaggcctttcccaaaactgtactctctgtccaggtatccttctctgctagatcaacttctgctcatttttcatgccccatctccagtgcccttactctagaaagccctctctgggtttgatggttgtcctagagggagtggccaggctctagtgcctggaggagttggccagggtcagctctaaagcccagccttgacgttgtcctgcccagctcctgggcccacgggggctgggtgaggctgcaattgagccctgggtgtggacatgatcaaggctgagcctgacggggaaggagacacaggagctggaaaggagtcatttgttggttgaatcatttggcaattgctgagccttatcactggctaggcactgggttaggctcctttgtagctgagctcttctctaattctcatagcctgtgaagtggggatggatctgtcctatttcatggattcacacttttatggatttgagcacagagaggttaagtggcttgctcaaagtcacacagccgctgagggtgggtttgaacttggatttttctgacgttgagcctgaagctttcctgcctcatacagcaggtgaggaagtgcagttttgtagctaggtggcctgggttcaggtactagctttgcagatgatgccaaagcttgcccatattcctctcaacccatttttggatgcagtggcctgacgtccagctgccagctcctgcattctaggggctgtctctggtggctggagcccactctgcaagtgaaataaaggctgggcacagtggctcacacctgcaatcccagcacgttgggaggccaaggcaggagaattgcttgagcccgggagtttgagaccagcttgggcaacatagcaagacccagtttttacaaaaaaattaaaaattagccaggcttggtggtgcatacctagagtcccagtgcctgtcctgccactgtcgcttctgtgagcttgggaattaacgcccccaggagtgaccctcaaccaatgactgatgggcattggtgtataaatacctcagctcccttgccctcaggtggagtgactctgaggtgcaatgcgctactctgccctccaaagctccccagtgggaccgagccctggttgcccttggtggtaatttccttgacaactcatcctttactggtggtcttcttcccctatctcatgacccatgtttttggggatcatgccccaaataaactacctgccctagaacccttgtctcaggacttccttctgggggagcctcaaccagaacagtcacctacttaacttgcaacttcagaaaaaccattcgaccttgctgaacaaaataaaatgaggaaaataatagcaacggtctcatagggttcttgtactgatcaaatatgccagtacatgaaaagtctccaccacagtgaccaacacagtgcaggcacctgtatgtggtaaagatagcaacagtagtaatatcttattactcacatagcaagtacttgataaatgccaaccatgatcattattgtgtttatcattactatttttatttttattttttaagagacagggtcttgctctgtcacccaggttggagtgcagtggggtgatcatagctcactgcagccttgacatcccaagctcaggtggtcctcctgcctcagcctcatgagtagctgtgactacaggcatgtcccaccaagcctggctaattttatcttcttattttattttattttttttttttgaggtggagttttgctcttgtcgtccaggctggagtgcaatggcatgatctcggctcactgcaacctctgcctcctgggttcaagcgattctcctgtctcagtctcctgagtagctgggattacaggcgcccaccaccaagcccagctaatttttgtatttttagtagagatggcctttcaccatgttgtccagcctggtctcgaactcctgacctcaggtgatctgcttgccttggcctcctgaagtgctgggattacagatgtgagccactacacttggctactatttttagctattgaacatcagccatgggtcaggcccatgctggggctcttgctttgttatttcatgaatcctttctactgccctcagagggagagttgattctcctccattttttcagatgaggaaatggaggcccagggaggtgcagccaactgcctgaaatcataatgtagcactattgggcttgttttgagactacaggaggtggcaggaggaaggcagtgggggaagctggggctgggtacctcctcattgctcctcccttacctcttgcagtaccttccaaatgaggcgggccttcaagatgagaagaaggtactggacaacatgcaccatgtactcttggtatggatgggacctgtcctgccgctgttggttctggtgcaccctgattacatcaaaccccttttgggagcctcaggtacgtgggctgggcctccgatctatggttgagtcctcaactcccagagcctatctgagattctaggcaggtgggatatccagaggaagggtcatttgaatagggctttgaaggatgaataagagtttggcaaagcaagcatggcaatccagattgtgagaacagtatgggcaaagatgtggcaatgactaagagttccagaaacttcgagggaatgtccatccatctggcagtcagagccaggcacgtttggataggcagttgttccttatggttttgttaagtaagtgttactcaatccctggccgtggcacgcccatcatttggttctgacattcccattatggccaggactcttggtgactcagcctgcagcctgctgtcatcacttgggctgactctgactggcagggagggagatgtggaagaattccttcttcctcgtgcagtccacacctatcccaagatgtgagacttccaagtctgcttggcaagctcttgctcagccttcaacacccagctccaatggccgcctcctccaggaatctttccctggcttcccagacagacctattctcagtcctaaccctttggacctgggtatgtctgtgtccagctctatcttcctcatgagcgggactctggatcctcagtgtggccttgtgtacctggtgtattagtcagttctcacgctgctatgaaggactaccctagactgggtaatttataaaggaaagaggtttaattgactcacagttccgcagggctggggaggcctcagaaaacttacaatcatggcggaaggggaagcaaacacgtccttcttcacatggcagcaggaaggagaagtgccaagtaaaagggggaaattcgttaaatctcgtgagaactcattcactatcatgggaacagcaacatgggggtaaccgcccccatgattcaattaccccccaccggatccctcgcatgacacatagggattatcggaattataattcaaaatgaaatttagatgggacacagccaaaccatattacctgggcacctccagaggtatcgggacatctgagagaactcactctcaaatgaaccaatgagctccagtaggtcaggcatggtggttcacatctgtaatcccaacactttgggaagctgaggcaggagggttgcttgaggccaggagtttgagactagcctgggcaacacagcaagaccctgtctctcgaaaaaaataaataattacccagtggcagtgatgtgcacctgtagtctcggctacttgggtggctgagatgggaggatcacttgagctcaggagtttaagaccagcctgggtaatctagcaagaccccatctgtacaaaagcatttaaaaatattagctgggtgttgtggtgcatgcctgcagtcccagctactcaggaggctgaggtgagaggattgcttgagcccagcagatggaggctgcagtgagctatgattgcaccactgctgtactccagcctgggtgacagagcaaggcttagtctcttaaaaaaaaaaaaaaagtgggagattccaggaattttaggatctctgtcccagctttgcctctacaaacacgcatctggggaccatctccagggctgccacccaggagctgtgaaagaagctgccatcttccccttccacagctattccctctcaatgccttgttgtctcccgttattacatttgtgaagggatgacgatccctgttgaactaaggggaaaacctagaccttgggagggagaattgactcttctgagggatgaataccaacttgtgggaagagccctgggccaggactgaggtgggttggcttcaaattctggccttggcacatgcttgctgtgagaccccagccatttatctagcctctctggatctcaggttttgatctgtaaaatgggtgcagttgtgaagcctgaataatataatgtggataagaggccacgtgcagtgactcatgcctgcagtctcagcactttgggaggccacggcaggaggatcacttgagcccaggagttcaagaccagcctgggcaacagagcaagactctatctttacaaaaaatttaaaaaattagccaggtgtggtggtgcgtgcctatagtcccagctacttaggaggctgaggtaggaggattgcttgagtccaagaggttgaggctgcagagagctatgattgtgccattgcatccagcatgggcaacagagtgagattctgtctctaaaaaaattaaaaaaaaaataatatggataggcattagtaagggtttctcttctgcctttttaatatatgtttttctttctcttttcctcctttcctttcttcttcctccctcttctcctcctccttctacttctctctctactcctctttccccctcctcccttctcttcttctttctctcctcctccttctacttctttcttcttctccttctcctccttctccttcttctcctccccatccccctcctcctcctccaccttcttctttttcttcctcttctttttagacagagtctcactctgtcacccaggctggagtgcagtggcatgatctcagctcactgcaacctctgcctcccgagttcaagtgattctcctgtctcagcctcccgagtagctgagactacaagtgtgcaccaccacacctggctaatttttgtatttttttttttcagtagagacggggctgcaccatattggccaggctggtcttgaactcctgaccttaagtgattctcctgccttggcctctcaaagtgctgggattacaggcgtgagctacagcgcctggtctctcttttttctccttcctcctcccttctcctccccctcagagcatcagtttcctgagcaccatcctgcctggttctgagactccaaacagaccgaggagtagtgccccagcaggggctgtcatgtagtagatgcttaagcctcttgccctcccctcatccagtggagggaggggatattctgtgtaccccatcagagaagccagatagggaactccaggatggaaaaaagggtggtgctgtgagtcagcctggagtgaggcctcttggccccagggtgcccccacctggaattacacagatcaggctccagtcacagacaccaccctggatcaggacctcctggggccacacctgggagtggcttgctgttctgagcttggagctgcacagcccttgagcctggaggagggcccagctcctgttggagcttcagtttccccatcatcttatgggcctttggactaggaaattttaatgagagaaagtagataaacatgctttatagagaacatgatgatatatagacatataattgtagcttgcttttatatcatctttttaaaatggaggtgaaattcatgtaacatataattaaccatttacaagtgaacaatcagtggtatttagtgtattcaccatgttgggcaaccaccagcattttccagtttcaaaatttttagtcacctcataaaaaaactctgtacccattgagtaatcacttcccatttccctcctcctcccatccgctggtaacctcgaatctgctttctgtctctatgtatttgcctattctgggtacatcatagaaagagaaccacataaaatgtgatctttttgtgtctgttttcttttactcagcataatgtttttgaagttcattcacgttgtagtaggaatcagtttcattcttttttttttttttttttttttgagacagggtcttaccctgtcacccagaggctggagtgcagtggtgtagccataactcattacagccttgaaatcctgggctcgagtgattctcctcctgcctcagcctcccgagtagctggaactgcaggcacgcaccaccatgcccagctaatttttatttttatttttgtagagatggggtcttgctatgttgtccaggttggtcattagggctgaattcatttcactgtatggatttttttttgtttacccattcaccttttggatgttgtgaatcatgctactatgaacatatgtgttcaagttttggggtggacatatgttttcatttctctcttgggtagatacctaggagtagaattgccaagtcatatggaattctgtacttaactttttaaggagccaccttgctgttttccacagagggtgtgcattaattttctactaacaggaaacacaactatttatctcacaagttcttgatgccaataaataatcattttaaccatagtaataaaaatagccaacagttggtcaattattcatttacctacgcacgtatttaatgagcatctaccatgtgccaggaacacaagagcttgttgagtcttatagggatgccatgaggcaagattgttctattttctcctttggcagtggtaacatgtccaggcttacatatctagttagtggcagggctgggatttgaactcagacctggctggcccagaacccaagctctcaaacatagtgatatgcagctttctgagcatgagtttctccatgctggcaccatgtgggggtatttcgtacaccgtctcatccatggtaggcattaccatctctccctctttttttttttctttttaaaaaacatttttgtagagacagagtcttgctgtgttgcccaggctggtcttgaacttctgggctcaagtgatcctcctgcctctgcctcccaaagtgctaggactgcaggtgtgaatcattgcacctggcctaccatctcctttttgctggaggggaaaactggtgaggagcgtggacacagactttcctggcattgtggtcagagttggagtggaaaaggaacctgaggatgagagaacaatggttcagctgagaagggggtttggagaaggcttcctggagtaggtgtcagtgaagctgggccccgaaggatgcctaggagcttgccagagaaggagtcccagatggaaggtcctgccagtgccttgatgcagatgtgtgaaaattccaggggaattcaggtgatttagggtggctggagtgaaggtgatatgttggggggaataggaaatgagactgacagttaagcaggaactggacagcaaagtgaatgaacttgtactttatcctgggagtgatagggagccacgggaagtatttgaacaagacagctattgaccagatcctggtgtcagaaagatccctgtggagcctatcttggagtccagagtgcagagaggagaggagtgactagactcctgctttcctcttcaatgctgcctcctccaggaagcctgccctgacttccaacagccctttttctgagccttccttagcacctagcacactttctaccttcttggtaattgcatggtgtgtctctgcttccctttcctgccccactcaggagctcctccagggagggcatagagctgagccatctgtgggtccccagcatcacccagcttgggttgggcacagaaaggcagcataagaggtgtgatgaatggggggatgagtgggcggatgattgtgtaggcaattggccaattcctagggattgtgtcggtgtaggtggctgagtcgcattcaggtaaaagtgatatcactcgaatttcagatacttccttcctgggcctctgcccattcagccccaaatctgttcagtatatagaaggaggatccatccattcatccatccactcattcattcattcatccatccaccttccacctatccactcattcatccatccatccactcatccatccatccaccatccacccatccatccattcatccatccatccatccacccacccaccatctatccatctgctattcatccatccacttatttatccatccatgtactcatctgtccctctactcatccatccacccatttattctttcattcatccatccttggattgacttatttattcatttaataaaaatttatctagcacaacatatcagtaatcaacacgaaccctcctgttaaggggcttgtaactaagtggatacaatccagagtgactgctgggtcaggggtggggagaagcattcaagttctcatacaggatgagggaagagtgtttggggcagagagaacagctggtggaaagtctcagagaagagagagcacgtggtctttttaaggagctgagaaaagttctgtggtgtggccgggcatggtggcttatgcctgtagtcccagcactttgggaggctgaacttggaggatcacttgagctcaggagttcaagaccagcctgggcaatatggcgataccctgtccatacacaaaattaaaaaattagccaggcatggtggcgtatgcctgtagtcccagctactcgggaggctgaggtgggaggatcgcttgaatccaggaattggaggcagcagtgagctatgatctcaccacacaccccagcctgggtgacagagtgagaccccatctcaaaaaaacaaaaaacaaaaagttatgtggtgttagttctgtgacgtcgaatagggggtggaagacagaggtgtcttgagagagatttggacaaaggcaaatgattcagggctttgaaaatgggctggtatgtgagggtgatgggtgtgtgagcaggaaggggcgtggtcagatctgatagtcagatgagattctcctggggccattcatgagggacacactggagagggtgaggctggaggctgggagcacaggaggtgtgattcagatggcctgagctggcagaaaataagggggtggattaggggaagactcaggtgaagaagtccattctggatagacagctcaacctggtcaaaggttcagaggtgatccacagcaggcgatgagaatagggttatctggtgtatgttgaaggatgaggtggtgggagaggcatacaggggccagatggaattgggtttcaatgccaggctgagcctgaactttttacaagtgcaatggggagccatgggaggtgtctgagcaggggaggctcatgttcagatcagtgttttataaggattttttctcgggtaggtgtggaggacggactgggtgaatacagtgggaggttggagcccagtgaggaggactaaggaagtcataagcaaaggtcaagggttggaactctgttttgaggccaggcacgatggctcgtgcttgtaatcccagcactttgggaggctgaggtgggtggatcacttgaggttaggagttcgagaccagcctggccaacatggtgaaactctgtctctgctaaaaatacaaacaaattagccgggcatggtggcggacacctgtaatcccagctactcaggaggcagaggcaggaaaactgcttgaacctgggaggcggaggttgcagtgagtggagatcgcaccactgcactccagcctggatgacagagcaagactccgtaaaaaaaaacaaaaaaccaaaaaactctgttttgagtcaccattttccctttgccctccacagctgccatcgcccccaaggatgacctcttctatggcttcctaaaaccttggctaggtgagtgcccagtgggtaggctggggctggggctttagagaagagagggaagagcatggggttccttggaaggtttcagagtaacaggagaggtccctaacctcagtcttctgggcccaggggatgggctgctgctcagcaaaggtgacaagtggagccggcaccgtcgcctgctgacacccgccttccactttgacatcctgaagccttacatgaagatcttcaaccagagcgctgacattatgcatgtgagtcctaaggctttgagggaagagggtgtcttgggagtgaggctggtccaggctccaactcatgcatgggcaagccatgtgatgtcaggagccctcactgactttatctataaaatgagcttgtagtgaaaacgcagtcgggtccttgttaggctgactccctctctgtggtttccatgcacagtcaccatgtatctctcttccaggctaaatggcggcatctggcagagggctcagcggtctcccttgatatgtttgagcatatcagcctcatgaccctggacagtcttcagaaatgtgtcttcagctacaacagcaactgccaagagtgagtgtgacccttcttgggaagatggagccagctgctctaggagcaagatggtggcaggagaaagggaactcccaggcattagacaactctggcctatgggagctctgccacggatgggccatgtgcttccgggaaactgaccatctctctgagcttcacttttttttttaatcaaaaaaatgggcatcataattccttccccatagtcattgtgtgagaattaaatgagataatgtgaatcaatggcttggtataaagtaggtgcttagtaaatgttagtattttttcattccactaggaagagtatgtggtctttggacagtgtcctccccactttctgaggctcagtttccttgtttgtaaaaaaaggatgacaatctcttactttctgagagatgctttaaggataaaatgatgcagcactgccctggcacatagttgatgctcagagaatatttgttgagtaaatgaatcaaataaccaatgccttgcttcattaattcattcattcatcaaatattcattgtgcacctactacgtgcctggcaccatgatattgctgctgagaacagggtggtgaacaacagacagtcacagttctgtgaagtttatagtctaagtggggacataaggaataagggagataattaatgcaaaacttgcaacacatagtaggtcctcagtaacaagctaatgacttcgttactctaggcattataggggcacgttccagttggataaggcagagattgtcttagaaattaaataattaattcatccaagaaatatttactgagtgcctagtaagtgccaaccctgaactaggtgctgggaacaccatattcaacaagaaagacaagatgttgcttttctagagcttccattttagtaggaagacaggtaataaccatgaacaagtaaacaaacaagaaaacgacagactgcaataagtgcatgaaaacaagcccacttcaggactgaggacagctcccttcaagcctgcttcacctgttagtttttaaaaaataatggctttgttgagacacaattcacatactataccatttactcatttaaagaatacacctgaactgcttttagtatattcagagttgtgcaaccattactataatcaattttagaatattttcatcaatcctcccccaccccaagaaacttcatacactttagcaacccgtgcacttccctttctccttcaagtctaggcaatcactaatctattttctatctctatagatttgcctgttatggatatttcacacggatggaatcatacagacttttgtgtctggcttgtttcacccagcataatgttttaaaggctcatccatattgtggcatgtatcagttatgtatttcttttcattgatgaataatgttccatttaccacataataccacattttgtttatccagtcacccatcgatggacactgtttccacttttcgacctttatgaataatgctgctattaacattcatgcacaaagttttgtgtgaacatacatttttaattcttttggctatatacctaggagcagaattgctgggtcatacggtaattccattttaaacattttgaggaactgctaaactttatttcagtgggtttcaacatggtatgaagtggttgtaccattttgctctcccaaccagtgatgtatgagagctccagtttttccacatactcactaacacttgcttttttttgttgttgttgttttgtttgctttttagagataggatattgctctgttgctcaggctggagtgcagcccaacacttgttattataagttttgattttagtcaccttagtggggtgaagtagtatctcattgtggttttgatttgcatttctctggtgaccagtgctgttaagtatcttttcacattctcattggaaatttctgtcttctttggagaaatgcctattcatatccattgcccattttaaaataagttttaagaattctttatttattttaggtaccaatcccttatcagatagacaatttgcaaatattttctcccatgctgaggagtgtaaccatttagttttagtgatgctacaatgactatgcctatgttgaaagtctttatccctctttgggcctgttcaaaaatatacccgagactgggtgtggtggctcagacctgtaacccagcactttgggaggccaaggctggaggatcacttgagctcacgagttcaaggctgcagtgagctatgattgtgccactgtactgcagcctaggtgacagagcaagaccctatctaaaaaaataaataaatgaatttaaaaatagagttaatatagggcttctctttgttatctattcaatggggacaggaggcttatcttagccaagccagggctgtgctatgctaggggaaggggctacactcatggatccccttctccttggcaggaagatgagtgattatatctccgctatcattgaactgagcgctctgtctgtccggcgccagtatcgcttgcaccactacctcgacttcatttactaccgctcggcggatgggcggaggttccggcaggcctgtgacatggtgcaccacttcaccactgaagtcatccaggaacggcggcgggcactgcgtcagcagggggccgaggcctggcttaaggccaagcaggggaagaccttggactttattgatgtgctgctcctggccagggtgaggctgggccccctggaattgctggcctcccgagggctggcctcccgaggaattgcatgtaaaatgataagtgttaaaactccattaggcgtggtggctcacacgtgtaatcccagcgctttgggaggccaaggcgggaggatcgcttgagccctggaattggagatcagcctgggcaacacagggagaccctgtctctacaaaaaacaaataagttgggtgtggtgccgcatgcctatggtcccagctacttgggaggctgaagcaggagtctggcttgagcccaggagttggaagctgcagtgagctatgatggtgccactgcactccagcctgggcaacagaagcgagactctgtctcaaaacaaaacaaaacaatacacatgctcaaaacaaaaagaaattcacatgggtctgggatggggtcagaacatgtaagacttactgcgtgagttttcttgggctgctattacaaagtaccacaaactaaatggcctaaacatcagccatttattctctcacagttctggaagctagaagtccaagatcaaggtatctgcagggctggtttcttctaaggcccatgaaggatgaatctgttccaggccttgctccctggcttgcagaaggctgtcttctccctatgtctgcggatcatcttccctctgtgcctgtctctgtcttcgtctctttgtataaggattagggccctgccctaatgagttcattttgtcttgattacttctgcaaagacctctctccaaacacggtcatagcctgaggtactggaagttaggacttatgaattctagcggagggggggtgggcagggaaccattcagctcatcacaattgcaaaaatgaaatacatgaccttgggctgggcgtggtggctcatacctgtaatcccagcactctgggaggccaaggcaggtggatcacttgaggtcaggaattcgagaccagcctgaccaacatggagaaaccccatctctactaaaaatacaaaattagccgggcgtggtggcacacacctgtaatcccagctactcgggaggttgaggcaaaagaatcacttgaacctgggaggcggaggttgcggtgagctgagatcatgccattgcactcaagtgaaactccgtctcaaaaaaaaaaaaaaaaaagaaaaaaaagaaatacatgaccttgaagagatgagacacttctatggtcactcattggtgtgtctgtggaccttttgggttctggattcaaatagtcctggattccagtcctggctctgtcgcttagtggatgtttgaccttagtcattgactcttcttcccaagcctcagtttctccatttataccatggtgatcataaaacctgatcacaaggttgtcaggcatccagtgggatgcttggtgttggaggctgctcaagaaatatgaacttccttcttctcctcactgttgactttctgtccctctttacatctttcttttcttttttcttgttttttaaaaatgtaatttaaagttccaggataagccgggcgcagtggctcacccctgtaatcccagcactttgggaagctgaggtgggaggatcacctgaggtcaggagttcaagacgagcctggccaacatattgaaacaccgtctctactaaaaataaaaaaaaaatattagccgggcgtggtggcatgcatctgtaatcccagctcctctggaggctgaggcaggagaatcgcttgaaccctggaggcagaggttgtagtgagccaagattgcgccactgcactccaatctggcaacaagagagaaactccatctcaaaaaatttttttttaaattaaatggaaagttcaaggatacgtgtgtagggcgtgcaggtttgttacgtaggtaaacatgtgccatggtggtttactgcacctatcaactcatcacctaggtattaagccctgcatgcatttgctatttatcctgatattctccctcctcctgccaccctgataggccccccaagtgtgtgttgtttcccccctgtgtccgtgtgttttcattgttcagctcccacttataagtgggaacatgtggtgtttggttttctgttcctgccttaggttgctaaggatgatggcttccagctccattcaggtccctgcaaaggacataatcttgttcctttttatggctgcataatattgcatggtatatatgtaccacattttctttatccagtctttcattgatgggcatttgggttgattccatgtctttgttattgtcaatagtgctgcaatgaacatatgtgtgcgtgtatctttataatagaataatttatattcctttggttgtatacccggtaatgggattgctgggtcaagtggtatttctggttctaggtctttgaggaattgccacattgtcttccacaatggttgaactaatttacgttcccatcaaccttgtaaaagcgttcctatttctccacagcctcaccagcatctctcactcagggtcttgctctgtcacacaggctggggtgcagtgatgcggtcatggttcactgcagccttgatctcctgggcttaatcctcctgcctcagcttcaccagtagctgggactacaggcatgcatcaccacacctggctgattttttttttgtagaaatggggtcttaccatgttgcccaggctggtcttgaacgcctaggctcaagtgatcctcccaccttagctgcccaaagtgttgggattataggtgtgagccaccatgctgggcactttccatctttattagacaagttgcatacttccatcttcctggactagttccccccacagcttggcttaagagagagaggggagccaggcgtggtagctcatgtctgtaatcccagcactttgggaggatgaggcaggtagatcacttgaggccacgagttcgagaccggcctggccaatatggcaaaattgcatctctactaaaaatacaaaaattagcttggagtggtggcatgtgcctgtaatcccagctattcaggaggctgaggcacgagaatcacttgaacctgacagtcggaggctgcagttagccgagattgtgccaccgcactccagcctgggtgatagagcgagactccatctcagaaaaaaaaaaaaaaaaaaagatgggggcggggagatatctgagttttgaggagcccctaggatgcggagggtgggatgaagtgggctgagcaccctctactgcccattccaggatgaagatggaaaggaactgtcagacgaggatatccgagccgaagcagacaccttcatgtttgagggtgaggatgtggggtgaggctggaggagggcaggaagggacatcattgtctgtagacagcatctctgctttcttcaggcagcctccattcagataccctcatctccctgcaggtcacgacacaacatccagtgggatctcttggatgctgttcaatttggcaaagtatccggaataccaggagaaatgccgagaagagattcaggaagtcatgaaaggccgggagctggaggagctggagtggtgagtgtggggtcaggggaatggagggggcaggttgaggccagagccttgggtgtaagcctctgctctcccacttactgattgtgtgacctcagacaagccactttagcttcctgaattgcaatttcttcagctacaaaatgggggtggttatagtgcctatgcccacctcataatgcagaagttctcaaagtgtcctagtcagcaattattgcaatgatgctgcataatgaacagctcccaaacttagtggtttacagcaagcatttgtttcttgcttttgtatgcacacatttcttgctcttgtctgctcattactctaattgctgttggacttggctgagtggagtggagttgcttcaaaactaagagctgggttcagatctgcttcatatactccctttctgttctctttggaccagaggctaccctgggtcgtattcttctcaaggcagattccagaagcacaaaaagccatgaaatttaaaagctttgcttgggccgggtggggtggctcacgcctgtaatcccagcattttgggaggccgaggtgggtggatcacctgagatcaggagttcgagatcaacctggccaacatggtgaaaccccatctctactaaaaatacaaaaattagccaggtacggtcatgggtgcctgtaatcccccctactcgggaggctgagacaggagaatcacttgaacctgggaggtggagtttgcagtgagctgagattgcaccactgcactccagcctgggctacaagagtgaaactctgtccccacccccccacaaaaaaagataaaataagtaaataaataaaataaaaaaaaaaaacaaaagctgtgcttgcactagaagattgcattggctaaaacaagtcacgtgaccaagcccagcatgaatggggcaggacatatactccactcacctgagcagaaggcactgaagaatcatatgacaaagggtacaggtatataattctaattcagggaggaagtggagaatcagaacacatacccagtctctaccagattcatgctatgtagagctgattctgggtgatgaaaagaaaacacagcattaggctgggcgtggtggctcatgcctgtaattccagcactttgggaggccgaggggggtggattgcttgagctgaggtgtttgagaccagcctgggcaacatgacgaaaccctgtctctacaaaaaaatacaaaaattagctgggtggggtggcgcatgcctatagtcccagctacttgggaggctgaggtgggaggactgcttgaacccaggaggtggaggctgtggtgagtcaagattacgccactgcactccagcctgggtgacagagtgagaccctgtctcaaaaaaaaaaaaaaaaaaaaaaagaaaagaaaagaaaagaaaagaagaaaaacacagccgcaacattaaatagcatcaactcacacagtgaggaggttcctttcggttctatttcaaccttttgccttatggcctcagggggacatgctcagtggggtgctactgtgtcctgaacactttgctaatcttccttttaaacaagtggagaagatgtctcaggttgagagagttgggtgggagttggtgtgtagacacaatttaataacacactactgctttcacagtggtgtttgtatggatgaatacctttatgccagggatgctgtttgccctttatagcaacatgaagtttatttttttttaagacacaggctggagtgcagtggcataatcatagctcactgcagcctcaaactcctgggctcaggcaatcttcctgcctcagcctcctgagtaggtgggactataggagtgtgccaccacaactggctaatttttaacatttttttaagagatggggacttgctgtgttgcccaggctgctctcaaatccctgagtgcaagcagtcctcttactttggcctcccaaagtgctgggattataggtgtgagccactgtgcccagccataaagtttctttgaaagagaacctgggccaggtgcagtggctcatgcctgtaatcccagcactttgggaggctaaggcgggtggatcacttgaggccagaaattcaagaccaacctgggcaacatggtgaaaccctgtctctactaaaaatacaaaaattagctgggcgtattggtgtgtgcctgtaatcccagctgcttgagaagctgaggcgtgagaattgcttgaacctgggaagcagaggttgcagtgagctgagattgtgccactgcactcctgcctggatgaaacagcaagacgccatcaaaaaagaaagagaacctgctaatttaaagaaactaatctaatctagaacatgaaccaagagttatcattagcccaattttgggccctaaagtccaagggaaaaaatattaagtaaatgatattataaggagataatgcacttttcttttctttcttttttctttttttctttctttctttttttgagataggctctcacactgtggcccaggctggagtacagtggcatgatcatagctcactacagcctcctgagtagctgggaccacaggtgtgtgccatcatgcccagctaattttttaacttttggtagagatggggtctctctttgttgcccaggctggtcacgaactcctgggctcaagttatccacttgcttcggcctcccaaagtgctgggattacaggtatgagccaccatgcctggcctgcaccagttttttttttttttttttttttaagacaagagtctcactctgtcacccaggctagagtgtagtggtgcaatctcatctcactgcaacctccgccttccgggttcaagcaattctcttgcctcggcctcccaagtagctgagactacaggtgcacgccaccacacccagctaatttttgtgttttttagtaaagatggggttttgctatgttggccagactgatcttgaactcctgacctcagacgatcgcccatctcagcctctgcaagtgctgggattacaggcgagagccaccacacctgtcctgcagcagttttttaagtacagaaatggaccatataaactggcatattgctgttgccgtgagtccccttggctgtcctggcacctcgcctaggtgcccctggacctccacataattcatcaattaaaggcttaatgctgggcccagcagagggcccagtgctagtgctgttctgagcggttggtgctcagatactttgcatcctaagtattagtactggccgggcactgtggctcacgtttgtaatcccagcactttgggaggccgaggtgggtggattgcctgaggtcaggcgtttgagaccagcctggccaacatggagaaaccctgtctctactaaaaatacaaaaattagccgggtgtgggtgcgcatgcctgtaatcccagctacttgggaggctgaggcaagaaaattgcttgaacctgcaaggctgaggttgcagtgacccgagatgcgccactatgttctagcctgggcaacaagagcgaaactcggtcttaaaaaaaaaaaagaaagaaaaaggaaaagaaaaaacaaaaaaaccactaaatattagtacttcccacctgtgcatgagacaactgcaaatggcagaaattggggcaagtctaaaatcctggactggtttcttgcccagctgcccctgagagagagagagagagagagagagagggagagagtgtgtgtgtgtgtgtgtgtgtgtgtgtgtgtgtgtgtgtgtgtgtgttttggggaggtggtgccatggtggctcggcctctagttatatctccattctccccagggacgatctgactcagctgccctttacaactatgtgcattaaggagagcctgcgccagtacccacctgtcactcttgtctctcgccaatgcacggaggacatcaagctcccagatgggcgcatcatccccaaaggtgcctaccatgttccgcctgctgctggtgcactgcctccaatgatgtagctgctctattgtccacaggggcctggctatgcctgccccaggtgcactatccctgcagatgggatagctctctgtgtgcctgttgcttctggggtgttggagaaaacccagttgtgtgtgcagggagatagagccgggtgagtccaggtggaaaggaaggaggcagtgtcgcagggatgggcctgtgagggtgcagttggggagggtcagtttcattcagttgccagttactccctggagaccaagccctgccttggttgatacaggggaccctggctcaggttttgagtattgccctttctgggggagatacagcagggtgcagacattcccaggcgtatggaatcaggaatgggctaaagggagagacaggggctggagtagctccaatatggagaggaatgcagggagggctgcctggaggagggaatgtgggaggtgaggcttggagtgtggaagtgaaagagtgagcatgtttatggagtagagcctcaggatgcagattttgaaaggccttgagtgccaggtgatggcgcttgaactcaatcctgggggcagcagggagccaaggtaggtgtttgagctgaagaggagcaatgtcagatctgcgagtaagaaagatccctatgtggccagcttggcagccagaaagaagatgataggttcctcttagggaaaggtgggaagagtggatggggcagcagaattttttagagaaggatggacagaaggtggtggcagatggctcatgggaacatcatggctctagggagacccaagttgggggatgtttctggaggaggccctggctccccttggccccactgatcccatctttccccacaggaatcatctgcttggtcagcatctatggaacccaccacaaccccacagtgtggcctgactccaaggtgagtgcctgccccactcctccctgccctcaggtcctcccctcccctgcgccccagggagccagcgagcagggctggttgcagggcctgagtgcgcacacccctccccactccgcatttagccatttattcacccactgattgttaattcattagggcagaaaatatttattgagcacctactgtgtgccagagtgtgtgctgggctctgaaaatagaggatgatactgtctttgcctttacagggctcacagtgaagttttggggaagacaataagcaaataaataagattttgggtattgatacatgcacaaaagaaagaaaaactgggccagttccggtttacaggtgcagtggctcacacttgtaatcccagcactttgagaggctaaggtgggagaatcgcttgggcccaggagtttgagaccagcctgggcaacacagcgagaccccccatctctaccaaaaaggaaaaagttggcccaatgtggtggcttgtgtctgtaatcccagtgctttgggagaccaagatgggaagattgtttgaggccagaagttccagctcagcccagcctgggcaacacagtgagaccccatttctaaaaaaaaaaaaagttagccagccatggtgatgcacatctgcagtgccagccactcgggaggctgaggcaggaggatcgcttgggcccagcagtttgaggctgcaatgagctatggttatttatttatttatttatttgagactgggtcttgctctgttgcccaagctggagcgtgtgcagtggtgcgatcttggctcactgcaacttctacctcctgggttcaagagattctcctgcctcagctttctgagtagttgggattacaggtgtgtgccaccatgcctggctaatttttttgtatttttagtagagatggggtttcaccatgttggccaggctggtcttgaactcctgagctcagatgatccatctgccttggcctcccaaagtgctgggattacaagcgtgagccaccgcgcccagcctgcaatgagctatgatcgcgcttctgcactccagcctgagtgagactctgactctaacaaacaaacaaacaaacaaagacagacaaacaaacaaaaaaaaagaaaaacaggtggagggggcactttagctcgagtggttatgaaaggccttgccgaggagatgtttgagctgagaacttaggggatgaaggatcagggagaagcctgttctaggcagaggaaacagcaagtgcaaaggccctgaggtggaatctcactggtgcgtgtgaacaacagaaggaggcaggtgtggctgcattgcaggaagtgcaaggtggaatggaagaggtggccctggggtgctccccatccatctttactgacccccagaggctcagggaagggggccaggctgggatgtctggggcagcccccagactcatctccaggctgttcctccctaggtgtacaacccctaccgctttgacccggacaacccacagcagcgctctccactggcctatgtgcccttctctgcaggacccaggtaacccctctatttcccctagtccaagccagctgtgtaggaacagaggcagggaaagatcaggaatgtgcctctcaggagcagagatcagatggcacccaggcgtcctttctgaagacccagcaccctctccccaatgcgccaggaggcccccaaatcagactctgcaatagcatcctgggtattgagcaccaacggtgtgtcaggccctgagttctgggctcccacgctcccattggctctatgatgcctttgtccccgtttttacagatgaaggaactgagactcagagggggcgctgtgtatccaggacacacagctagtaagaggctgtactgggattcagacactcaaccccaaggtcacattaattgagcgatccgtggggtctcactttaaccctcacccagcgtggggtttcactttaaccctcagccagcccaggatgcttgcttcattttcaaaggaggcatgtgacccccggggaccagtgctcacacagaagctgggcctgagccctgtcccctcttcctccaggaattgcatcggacagagcttcgccatggccgagttgcgcgtggttgtggcactaacactgctacgtttccgcctgagcgtggaccgaacgcgcaaggtgcggcggaagccggagctcatactgcgcacggagaacgggctctggctcaaggtggagccgctgcctccgcgggcctgagcgtgggcgcgcccctgcggctcccgagggtccaggccccgcccccaaaggaccaggactcgccccaaagatcccgagggcataggccacccccctcgaagttcaggttcagctcctggatgaccaggcaccgctgttgagcagcctggtggtactggccacgcccctcaaggcaaggctcctccccttagggggcctgatcccgccccttgaggcttaggtcccgccccctgacttctcgcacctgtcctgtttgagggaccagggtcgaccctgcccccttgggctcaggccccgcccccaggatcctacggattgaggtcctcaggccacgcccctgcagatccaggtctccaggccttgcccactgagccttcagaggacctaagacccacctatgactcagggcccaccacaccccacccccccccaactggctgaacccctggcaggcttccaaactgaggaaagctggagcctgacgtcagagcttttaactcggacatcaccctcctgaggccctcagctcatacgggcagactgctcaggcgtgaggctggatcgtagggttcgaggctgcttgcttttgttgttgttttgtaaactcagacccttgtaagccccttccttcctcccttgcccaaagatcctttgctgagtgttctgtttttgcagaataaaagcaaaggatgcagacttaccccaccctccacccctagctcagccagatccttacacgtggagcccccagcatgggaatgaggggctctgcaactgagcgaagctgcgggctaggaggctggaaagccatttatcctaggacataaactcagattttgggggtcagtttgtgtgttcatttatttcatcaacagatcacatattgtttgctggcactgcttcagaaccacaggcaggccctgttttctgccttcttagggggtgggggacagatgttgaacaaataattccacgtgtaaaggtttatttacaacccaggacaggtgctccaaaggagaggccccgggtgctggatgaatatagcagagggatggggatgggtcagggagagcttctccgatgctggaatggaagttgagtgggtgacaaggggagggaagagtattccaggcagaaggaacaacatctgagaataccctgagctgagggagaacagagtgtgtttgaggaactcaccaggggccaggtggttggatctgggaagtgggggcagaatgaaggaaggggccaaatgcacaggctttatgctgagggcaatagggagccatggagagtgtgtgagcgggatcaggacaggacatggccagatctagggctggcagggaggtgacttgcggggttgggaccctgggaaagagggaagctgaggtccagacaacaggaagggccaggattggggtgactatctagcagtgggggctgaggggagggaggtggtaagggtgatgctcaggtatttggctgagggaacttgatggtagagtagtccctgatatgggaatataaaagatgggggccaggcgtgatggcttacacctgtaatcccagcactttgggaggctgaggctggaggattgcttgagaccaggagttagagaccagccagggcaacacagtgagactccatttctacaaaaaataaaaaattagccaggtgtgatggtgcacatctgtagtcccagctacttgggaggctgaggcaggaggatcacttgagctgaggagtttgaggctgcagtgagctatgatcacaccactgcactccagctggggcaacagagcaagaccctgttccaaaaacaaacaaacaaaaaaaggtgggcaatgacaatgtcagcaattttatacatataaaatgctacactaaaggaaaatgatactgctattataccacatatataatatatatatatgcactatatatgccatcattatatatatagtggtggtataatagtggtatcatcttccttttaggtagcatttgcctgtagactatttccatctaggtcactagagacaataatattaattcaacaggccgggtgcggtggctcatgcctgtaatcccagcactttgggaggctgagacaggtggatcacctgaggttaggagtttgagaccagcctggccaacatggtgaaaccctgtctctactaaaaaatacaaaaattagccacgtttgatggcgggtgcctgtaatcccagctactcagtaggctgaggcaggagaatcgcttgaacctgggaggtggaggttgcagtgagccgagattgtgccactgcactccagcctgggcgacagagtgagattctgtctaaaaaaaaaattaatttaccaaatatttcttgggcaatctgccgtgagacaggcactgtttgagccctaggttcccagagtttacctctagggaggagatatgataaatgataaataagtaaagaaagaagtaaattcacacagggccttttctgtgactttttttgtgacagaaatggggagttctgagcagaggagggacaagctttgtcatacgaacttttttttttttttttttgagacagggtcatgctttgttgctcaggctggtgtgcaggggtgcaaccatagctcactgcagccttggcctccttgggctcaaacgatcctcctgcctcagcctcctgagtagctgggaccacaggcacacaccaccatgcccagctaagctttgtatttgttatcgagacgggggtcttaccatgttgcccaggctggtcttgaactcctggtctcaagcgatcctcccacctcagcctcccaaagtgctggaattacaggtgtgagccaccatgccaggacttccacaggactttgtgtgctctgttaaacagagacagtgtgagcaaagatgggactaggcagatcagttaggggtgactgcattcgtccaggtgagacatgatggtggcttcaaccaagccggggtctttagatgtgatcaagagcaattggattccaaggaggagtgactgttcacaaaggcagtgctgtcaggcttggtggtggataaaacgtgaagtttgaaagaagtgggggacactaggtttgggcttgaacatctggaaaaatggaactgccatcagctgacgtggggaatgctgagtggagtaagttgttttgtgggagatgtcaggatgtcagttttggttcagaggaattggacatgtcagtcgaataaacggttctccaattcaagagttttgggttgggcatgtatatttgggaagccttagtataaatattttatatatttttccaaaagctagtgaagcgatttcaaatgggggtgatttttcctaccagatgacattcgttgttatttggaaacatttttggttgtcacaaccggtggttactatttgcgtctagagggtagggacccagcactctgctaaacattctacaagacaaaggatacctagctcaataaaacaagtaattatccagtcccaaaggcaacagttctgctaattaaaaaccatgaactggagaaccaaaacaaacaaaaaaaaaaaaacaaaaaaaaaaaaacagaaaagaaagcaaaactttaagactgggtgagatctcatgtgtgcgtgtgtgtgtgcgcgcacgcgcgcgcgcgcgtgtgtgtgtgtgtgtgtgtgtgtgtgtgtgtatggagtaagggcttaagggagccctgggggtggtctccaaagttaacctaacaattatgaggccaggcgtggtagctcacacctgtaatcccagcactttgggacgccggggtgggcggatcagttgaggcgaggagttccagaccagcctggccaacatggtgaaactccatctctacttaaaatacaaaaaattagggcagggcgcggtggctgactcctgtaatcccagcactttgggaggccgaggcgggcggatcacgaggtcaggagattgagatcatcctggctaacacggtgaaacactgtctctactaaaaataaaaaaaaaatcagacgggagtggtggcacgcgcctgtagtcccagctactcggtagggcgagacaggagaatcgcttgaacccgggagacggaggttgcagtgagccaagatagtgccgctgcactccagcctgggtgacagagcgagactcggtctgaaaaacaaaaacaaaacttttttttttgattgagtgcttcctgtgtgctctttccatatattcccatttaatcctcatactgacttgtaagatcactttttattattccgtttaacagaggtagaaactgagcccccgaatgaagtgacttacccaagatcattcggtgcggcctcagcgctggcgctgagtcctcttctgccccacccctcaggctcccagtcctggtctagatccctagccacgtagcgtagaagggggcgtcgacgggggttgggctagagttggagcggggaggagatgagctaaagcggggctggctgtgcgagaggcagtagcagcggcgtgtgtcctggggcgccccccggtggcctgtgctggggtcgtcggccgggatcccctgttcgacgtactccggggctgaatgggaaacagacagtcccagaccctacgtgagccacccggatcttgcaggtgctgcctctcctacacccccctcccaaccgagggtctccaagagcgcatcctttgccaaacatctcctgggcccttttcggcgcaacctcgccatccactagcaaacgaagttagccttgagatccgacatatgtgggctcaatctaggctcttccttcctaggggcggccttgggcacgtgactgtccctctctgcacctcggctttttcttgtcatgcgaatagtccggtatcatcatgcttgtaatgcacactgagtttccgccaagggccacgagggtgaataaatgagaatgagaaggggaggagtaaggtccctgggtccccggagccctgttacacgtactgcaagtgtaattctcaaaacaccgaagtctggtcctgtcgctggcggctgtgggacctccttcctcctgagtgtgaagaacgctccctctgctggacaatttggagatccattctctattcgttcaattttgtgtccgtgcacgtttgagcgtgcatgtgtgaccgcgtatgtgtttgggtgcatttgggtaacagtgtgtgcatgtgttgtagtgtgcacacgagtgtgtgtaaacgtgtatgtgtcggtgtgactgtgtgtgcgcatatggatgggtgtgttggaaggagaggagaggagaactccactcactgagtcactgtaactatccacacacaccaggctgtgttcctgctcatggctggagccactgtcagagcccttgcctctgtccccaggtctgacctgtgcggtgcaggcaggacattctggagaaatcatgcccttggaggaagctgtcagtaatgactggtgggtattggtggataaataccccagctccctctctctgggggtgaagactcccttgttctgggaggtgcatgttctattctgtctccctgaggtactaggcagggctgagccctagctacccacagtggaaacttcctcaataaaggtccctttaactgctgctgccttcccttccccatccctcttctccattgccctaattgtgtttccagggatcacctcccaaagaaacaacaggcagttgaactcttgtcttatggtcaccctcctgatagaggatttgcactcaactccttgtattaaggtctagttccagggaacccaaattaagacacacatgtgtgctggttcctccaatccccagaagcctgtcagtgtgcgcttttatttattttttttaccaacgatgaatgtgaggctcagagagggcaaatcacttgcccaaggtcacacggcagtgagggagtggcagagcctggctttgactatgggctgtctgaccacaagctgggtgctcactcctctcctgacagcctcctccctcctcaaggacatggaaggagcagggaataagttataagtgtaaaatttgaaagggaaattcttccgctttctgcttctgcttctacctctggcccagcagtttggtgtgctcttttttcagtttttaaaaattaaaaaacgttcatatatatatgaacgttttccaatgtatataaaagcatttatgcacacgttaccgggttttttttgtttattaaaaaaattttttttttggagacagggtctcactctgtcacccaggctggagtgcagtggcatgatctcggctcactgcaacctctgcctcctgggttcaagtgattctactgcctcagcttcctgagtagctgggattacaggcacaccaccatgcctggctaattttttttttgttatttttagtagatatgaggtttcaccatgctggccaggctggtcttgaactcctgacctcaaatgatccacccaccttggcctcccagtgctgggattacaggggtgagccactgcacccggcctttttttttttttctttttttgatacagggtattgctctgttgcctaggctggagtgcagtggctcaatctcaactcattgcaacctctgtctcctggggtcaagcaatcctcccaccaccacatccagatgcttttttttgtattttctgtagagatggggttttaccatgttgcccaggctgaactggaactcctggattcaagtgatccgcctatgttggccccccgaactgttgtgattacaggcctgagtcactgcacccagtccattatcagttttttgatgactccaaacttgttgggaaatatatctgtttcaattatctattattgtatattgaactaccaggaaacttagtaggttaaaacaatatacaggccaagctcggtggctcatgcctgtaatcccagcactttgggaggccgaggctggcggatcacctgaggtcgggagttcgagaccagcctgaccaacacggagaaaccctgtctctactaaaaatacaaagttagccgggcgcggtggtgtgagcctgtaatcccagctacttgggaggctgaggcaggagaatcgcttgaactagggaggcagaggttgctgtgagccaagatcatgccattgcactccagtctgggaaacaagagcgaaactccatctcaaaaaaataaaaaagatatacaagttttttttttttttttggtatgtgtgtatgaactcctatctgtatcagaatatatacaacttttagtttgctcacaagtttacaatttgggcagggctcagccaggatggctttctcagtcctacacagcatcagtgtgggcagctcatttgaggctggaagagatactttgaggtggctcactctcatggctggcaatttggtgcttcctatttgctggtaccgacttcctgcctcggcctctcaaagtgctgggattacgggcatgagccacaatgccctgaccattttattttttcttttattttctttcttctttctttttttttttttttttgagacagggtattgctctgttatccaggctggagtgcagtgatgcgatctcacctcactgcaatctttgcctcctgggttcaagtgattcttgtgcttcagcctcctggatagccaggattgcaggtgcatgccaccacacctggctaatgtttgttgtgtttttagtagagacagggtttcgccatgttggccagggtggtctcaaactcctgacctcaagtgatccacctgccttggactctcaatgtgctgggattgcaggcgtgagccactgcacctggccaaaatatataatacattaaaaaaataaagtttattaaaaagaaaaagaagagaggaaatcactgagtaacatcgagtaacatgctctggtggtggttcctagctcttgtgtgacctctgaacttttccaaagttcccttctaggatttctgtctcccaatccagttcatctggtcttctgtcacccgggctgcaaatgtggcagttatagctatacctgctggtcctgccctcaatatggactaaggggcttgttgggtttgcaattcttcttcttcatcatctttttaatttttatttatttatttatttttttgagatagggtttcactctgtcaccaggctggaatgcagaggtgcaatcctagctcattgcaacctcaacctcctgagttcaagcgatcctcccaccccagcctcccaagtagctgtgaccacaggcatgtgccacaacacctggctaattctttgtatttatatatgtatatatatatatatatatatttttttttttttttaaatttactttttcagagatagggtctcgctgtgttgctggtctcgaactcctggggtgaaacgatccacctgtcttggcctctcgaagtgttgggactgcaagcatgagccactgtgcctggctgggttttgagttcttgagagtgttaaatgaaacttcaacactggcttctggtgtgagcgttgggtgagatttcatcggtcaccacatgggtctccagtgcaccctgcttctcctgcatctcttggttgcaggcacccctctagctctgattatctcagtgcatttgaggatggaagtgagaatgaacatgtgtgtcccacctggtgctgggtctttatacagtggcccttatgcagagccccctcctttatgtcattcaggttcctgctcaaaggtctcctcttgggacattcctgcctgatcactgagtccagaacagccccctcagtcgctgtctagcttgtctcattctgttaatttcccataagagaagtggcatgtcaccatcaccatgcactattggttaagcaacttgagtagcttgggacctcagcctcccaagtagctgggaccacaggcatgtgccaccacacctggctaatttttttgtatttttgtattttttttgcagagatgaggtctcactgtcacccaggcactataggttaagcaaccaatagtgtgtggtggaggtggtgacatgccacttctgttctcaatcccaggccagtccagattcaaggggaaagaaattaagctctccctcttgctgaagacagtgacaaagactttgtggctatcacctttaaggggtctgggttagaatctgagattctgcatttccaagatgctgctgatccaaggatcacatcttgagtgtccacttcttatagctcatggctagaaaagtccctttcttccctaaatatttaatgagcacctactacgtgccaggattcattttcacccatgctaatgtttaattacttcattgtgtggctggagcaagtttcggcacctctctgtttttgattttccccctccctcttctccccagacctagctgggcacctaccctgttgcctcccacctactccagggggccctggccttgcccctggctcgtctgtggggtggaccaggtggagccaccccagtagagaagaaggagaatctgtacatctcagcttgctggcagctccagggccctccaacgtgctctaggacctgaagctggatcaggcagggctacatggtatgtagttagctcttagtgggggaaggaaattttggacatctccccaacattcgatcaattacaggaggaacacctatcctgattttctcattcagcagctccatccttcaaacttactctcatcttggggctgggcttgagggctcacgcctgtaatcccagcactgtgggaggccgaggcgggcagatcatgaggtcaggagttcaagaccagcctggtaaacatggtgaaaccctgtctctactaaaaatacaaaaattagccaggcgttatggcgggtgccagtaatcccagctacttgggaggctgaggcagaagaatagcttgaacctggaggtggagcttgccatgagctgagatcgcgccactgcactctagctttggcaacagagcaagtctccacctcaaaaacaaacaaacaaaaaacgaaaaaaaacccaaacaccaagaaaacagaaaaccccactcaccctcatcttagcgcctgagggctaagaacacccaataggggatttcaggacagtatctgaacaagatgtgcccctttaaggccaacatcccatttcccagataggaagacccagtcccggagacccagcactgcccacagtcagagcaaggacggggcagaatgaggactccactcagagtcactccgctctgcccacccacgcctgccccctgtccgcccacagcccctctcactcttgccccctatgcctcccaccccaccttctacactgaataaatcttcccattatagtgatcccagagtcagctacttaagagtcttggccaggcgtggtgactcacgcctgtaatcccagcactatgggaggccgaggcgagtggattgcctgaggtcaggagttcaagaccagctgaccaaaatggcgaaaccccgtctctactaaaaatacaaaaattagttgggtgtggtggtgggcacctgtaatcctagctacctgggaggctgaggcagaagaatagcttgaacctggaggcggagcttgcagtgagctgagttcacgccacctcactccagcctgggcaacagagcgacactctgtctcaaaaacaaaacaaaataaaacaaacatcaaaaaaatgaaaaaaccccactcaccctcatcttagtggctgagggctgagaacacccaacaggggatttcaggacagtatctggacaagatgtgcccctttaaggccaacatcccatttcccagataggaagactgagcccaggagacccagcactgctcacagtcagagcaaggacggggcacaacgaggactccacccagagtcccttggctctgccctcctatgcctgaccctgtccgctcatggcccctctcactcttgccccctgtgcctcccaccccaccttctagactgagtaagtcttcccattatagagatcctagagtcagctacttaaaggtcttggctgggcacggtggctcacgcctgtaatcctaaaactttgggaggctgaggcgggtggatcgcctgaggtcaggagttcaagaccatcctggctaacagggtgaaatccgtctctactaaaaatacaaaaaaattagccaggcgtggtggtgggcacctgtagttccagctacttgggaggctgaggcaggagaatggcatgaacctgggaggcggagcttgcagtgagccgagatcacgccactgcactccagcctgggtgacagagcgagaatccgcctccaaaaagaaaagaaaagaaaagaaaagaaaaaaaaagagtcttgatgagtttcacttgctgctgaaggcttctttcctttctatctagtttcctaatcctcactgctgtgcatgcagataaatctgttttgcattaattaaaacaaacaaaaccgaccacagctgcctggtttactcttccagttctcctcttaatccccagaatctgacctgggtaatcctcagcggggctggattctttgttctttgttcctgctcctggccatcatgtgtcacctcagccctgggctggctggaggcaggacttgaatttctgccaggttgtgcagtcagaggccagagactcccttctccaagtctcctaattctgcaccgagaaatggtgcatggtgtcctcccagcccacttgtgggagatgtttgggtgcaaggcttggcctgcctggttctccttgcctgacgcctgaattcccaacctcatgatttacgtggccttggaagggcaggggcagctgtaaacttggggtcccagagtcaccttggccccaggttcaagcaggagatactgaaggctgaagatccagtttccactctgaactgtgacactgacttggttcctctctgcacccagctgatactgcctgcaggttttggccagctgcccaggcagggaggaggcagccaggcctatggcctacggggattggctgcccctgactgcccagcccagcccagccttgcctaggtgaggggccagggacaaagaagccccaggaggagggaagaggaagttgtgtgggacaagctgctcctgacagaaggtgccaggctggaactgtcggggctggagggtcctggtctgggagagggaggggcactgcccaaggctggggtggctccagggagctggtcctggtggggctgatgggttcctggtaactgaaaccaagccactgacaacctgcagtgattcaggctgggcctttcaggactctaatcagccttcctctctctctttctctcttccctctctcttctttactctcttctctctccgcctcttctcctggctgtacctgggtttccctctctgctttcagcccttgttttctcatctctgagctctccctgcctccagcacctcccatccctgcccctgtccaatgtccccgaagctccccgggctctttttctgggcctcaggacctcaccctccatcccgtgtgccctgcaggatgtcgctgctgagcctgtcctggctgggcctcgggccggtggcagcatccccatggctgctcctgctgctggtcggggcctcctggctcctggcccgtgtcctggcctggacgtacgccttctatgacaactgccaccgcctccagtgtttccagcagcctccaaaacggaactgcttttgaggtcacctgagcctggtgagtatggcagcacgacgggtctggggtctcagggtgggtggacttctagaggggtgggaatggggctcagggagctggatattgagggtgggttggggtctgggacatcagaggagtgagggaggccgaggggagcccctatttcctcactgccccaaccggattcattcctcctctctgtccactccatggccccaggcctttttctttctctctcttccccaccctaagcctgctttggctcaagttcctacttgtcttccccacattaatgcatcgttgtatccttgttctactgggggcttctagggtggactgcacagagcaggtactccctggctgcccatgttttttttttttttttgagacagggtctcgctctatcacccaggctggagtgcagtggtgcaatcatagctcaccgcagccttgacctcctgggctcaaccaatcctcccatctcagcctccccagtagctgggactacaggcgtgcaccaccagacctgctagtttttttttttgtagagacagggtctcactatgttgcccagagtggtctcaaactcctggcctcaagcaatcctcccatctctgcctcccaaagtgttgggattacaggcatgaaccactgcacttagcttagtccacaatccttatcactggacttgaggtctcctcacggggagagtccagagtccactctctgcctggcccatctctgtgggcctcaggctggtgtctactcctctctgggctgctgcctccccataagatttgctatttctccctaccgcacccacagggcacagctgggccagaggaaagatgtggctggtttctccctccgtgtctttaatcaggcacctttttttcttatatttccctccacccctaagatatgtcaatgggccccattgctcagtttggataacagttgactacttttcctttcagaagggatcattctggcctctgccctaacagccaaattccctgggaggagattcctcatctccctcatcctagcctcccccctagaggacttttctccatgctgtgttggccctctactgccagaatcataccttgggttggtcattatctgtaaaggcgccactccaatgccattgattcaagtgttgccttctctgaccacaatcccttctctccttctagctttttctgttcactatctctcaaccttttttttttttttttttttttttgagatgtcgtctcgttctcactcgtgcacaccaaggctggagtgcagtggcgtgatctcagctcactgcaatctccgcctcccaggttcacgtgattctcttgcctcagcctcccaagtagctgggattataggcgcccaccatcacgcctggctaatttttatatttttagtagagatgaggtttcatcatgttgtccagggtggtctcaaactcttgacctcaagtggtctgcccaccttgacctcccaaagtgctggcatgagccactgcacctggcccactgcttctcatcttacaccctgttgggacttccagttctctctacaccccagtctagcagcttcttccagtccttcctaggcatagttcctattatttgctcatgggctggtttctggccaatgggactttctttcctggccatttggaagacctttgccttagatgagctcaatcgcccatgttctgtctttatttttcattttttatagagacagggtctcactatgttgcccaggctggtcttgaactcctgggctcaagcaatccacctgcctcagcctcctaaagtgctgggattacaggcatgagccatggtgtctggccacccgtgttctctttatttcttctctacaacaatattagagaaggtcacaaagcaggtcagatgggtgatatgtaaattccctcccacccacctcctgtgcaccacattctgcgcccagaccttcagcctgcttgctctgctgtcccctcaaagacagagttgccttcactcactccctttgtttctctgatcgcccctcacctgctctccaccccatcctgctgtcttgaggtgaccgtgaccctcaagcccccaaatcccatggacacctcccagccccaactcatctacctcccagcagctctctgaatttgtgactactcagtcattcccagtacctccttttttcttggttccaggacgttgccattccctggtctcctctgaccttcgtgtgctcccgtgtctctgctgttggctcctcactatggggagatcccccatggtcctagtcattcctccctcttgcctctctcctgaggtcacctccttacccagggctccagcttctaaattgaccatcggttccctctagaagtgagctctgagtttacatctcctgagctggaggtcattgcttctctcctctcggggtgggggtggtctcagaaacacttccattccgatcggtttgaatctgaactcatggcccccctccctacactgtcccccattttggtctagtccttcagtttcccagaccccacgctttggggtctcctgatgttctctttctctcatctgcacatcctgtccctcagcacgtctgctggtgctgcctggcacagtctctcctccgtcaattccttctctgagtcctcctgcctcccctggctccatcccttgccacctctctcctggatgcctcccacgggcgcctccctggtctccctgttgccgtgcccaatcctttcctccactctctcctcagtcccggacaggctttttccttccttccttccttccttccttccttccttcctctttctttcttcctttctttctttcctttcttcttttctttctttctctttctttctttttctttcttctttcttttctttctctctatctctttctttctcccttccttccttctttctctttctttctttctttttctgtctaaaaaaggaaaccatttataaaaattacagacaaaagcacacaaattacactacaaatccattagagatactatcaattggctaacaggcaaaagttttgcctacacagtttgaataaatagagacagagattatcgacaaatttaagaaaatcgatgcaatctcataatcaataaagacaatttcagatgtgaccttttattttatttttttatttttttgagacagggtttcattgtgccgtccaggctggagtgcagtggcatgatctcggctcactgcaacctccatctcctgggttcaaatgatcctcctgcctcagcctccctagtagctgggactacaggcatgtaccaccatgcccggctaatttttgtatgtatatatatggtttttttcggagacagagtcttgctctgtcaccaagactggagtgcagtggcatgatctcggctcactgcaacctctgcctcctgggtttaagtgattctcctgcctcagcctctggagtagctgggattacaggcgtgcaccaccatacccagctaatttttttttttttttttttttgtatttttagtagagacagggtttcaccatgttagccaggctggtctcaaactcctgacctcaggtgatccgcctgcctcagcctcccaaagtgctgggattagaggtgtgagccaccacacccggccaagatgttacttcttgactattacattgataaaggctttttaaaaacatataaggccttcagtgtgtaatgctgtccaccttcatacggagcagatatgcatgtggatatttataaaattcttcttcaaagtaattttgcagtatatatcaaaaacttcaaactataccaatgacttattttgaggacactatattcagttgataatcaggtatatgtaacataattacatgagacttccattgcatttgttatgctagtaataaatagtaaacatgttttcaaaactagtgaattaattatggtaaagccatatggaccactgcaagttccctgagagcaaaagtgacttcacctgtcctatcccctgctctatcacctgaatgtagaatgcacacagtctatcttgaataactatttgttgaaggaactgtatgaaaacattaatcattatgcttgtgaagactgattgaagaataattaaaacatcaagctacatgaaaacatgacacagatcttatagaatgagagctcaggttttaaagtttgttatttgcaatgaagtaaagagatgagatggctggtgcagtggctcatgcctgtaatcccagcactttgggaggccgaggcaggtggatcacctgaggtcaggagttcgaaaccagcctgaccaacgtggtgaaaccccatctctactaaaaatacaaagattagtcgggtgtgctgatgggcgcctataatctcagctactctggaggctgaggcagcagtatctcttgaacctgggaggcagaagttgcagtgagctgagatctatccattgcactgtagcctgagtgacaagaggaaaactctgtctcagaaaaaaaaaaaaaaaaaagatgagacctggacagacttttttgatagactgagccacttattgggaggcggaggttgcagtgagccaagatggccccattgcactccagcctaggcaacaagagtgaaattccatctcaaaaaaaaaaaaaaagtggctgggtctcattttcctctttattggtttgtgccacccaacatcatacgatctgtcatcagcaccacaggtgctcactcagaacacctggaagtgggtgctatggcagtgtccaaagcctgtgagccccttcttgcccagcttatgtgttgatcctgtaggacccaaggtccccgtggctctggacgcccttggtcatcttttatttctttcatttatttgccaatctccatcctagggatccttggagagactcagttgaggttctaccttggaggcacccccaatcttggggccacagaactagactgagacactccacatcctgtgtggtcagggctggcttgaaggagagatggactgtaggacccctgaggggaatcagggtttttgccaatggggcaggcaggcaggcttcctggaggaggggtttgtggaagtgggtctggaatgatgagtaggaatttttttaagcaaagaagagaaagagaaagataatttcatgtggaggttgggccaactcgaagacttggaggtgagagcaagcacctggcttttgagcagcaagaaagagcttggtgccaccagaacaattaggatgagaggcagaagaaagagggaggggaggagattgattctgaggacaatggggagccctggagggtgtgtgaacaggagaggggcaatatcagctgactggctccttccgttgccccacctggtttctctccctttttatcaagctcctttctatagcaacccttgcagaagtatctgcaattcaggttttgcttctagagagcccacactaagacagggccttatgattctccagtcattcctctcccactgacctgctacctctgctcttgttctctgactggcttctacccattttcttccacttccttctggatctcttctgggcatctccttcagtctttcccagctggctccagcctgggcacagttgtgggagtgatgggagtatgagacagaacattctcccatgaactcaaattcagggctatccttggggtgggatgtggagcctggtctgggggtggtgcagccaggcttgggagaaggggctgtgtctacatcttccccctgctaacttgctgcaaagctgggggtacctgtctagagctaggggcaggaggctgtgctgggactaggggacaggagagaaagttcaatggactgagattcattatgaatttgggataaacagcaagtggggtgaatggtcaagtgttggtggggagagacagggagagggatggagagttggacttgggagagacagtgatagggaaaaagatgctcacacagagaaagagagagacagtgagagacagagtgagggagagagaggggagagggagagaaagacacagagaaagtgacacataaacagaaagtaaaagaaacacatagacacacatatctaaatctgtcattgatcatatctgtcatctatgtagccatcactcatacatctctctcatctatacctgtctctcttatctctctatccatctatcctatttatcatctatcgatctgtcacctacctttctctttctctcatctatctgtctatcgtattatctacctacctacctacctatccatccatccatcctgcctgtgcatccattcatccttctatctatcctatctatctatctatctatctatctagctatctatctatctatctatctaatctatcatctatccatccatccatcttatctgtgcatccatacatcaatccatccatctatcctgttatctacctacctacctacttatatacctacctcctacctacctacctacatatccgtccatccctcctatctgtgcatccatccatgtatcctatctatctatctatctatctatctatctatctatctactttttttttttcaagatggggtctcgctgtgtcacccaggctggagtgcagtggcgtgatcttggctcactgcaacctccacgtcctgagttcaagtgattctcctgcctcagcctcccgagaagctgggactacaggcatgcgccaccagacccggctaatttttgtatttttagtagagacaggggggtttcaccatattggtcaggctggtcttgaactcatgacctcgtgatccacccacctcagcctcccaaagtgctgggaatacaggcatgaaccaccgcacctggcctatctatctatcttctatctatctgcttgtatatctaccgactgaccaacctacctacccatttatccatccatccatccagcgatccatccatccatcctatctgtgtgtccatctgtccatttaatctatctatctatctatctatctatctatctatctatctatctatctaatctatctatctatcatctccctccctccctccccacctacctaccaatccatccatgcatccacccatcctatctacgggtccatccaaccatctatcttattatctatctgtctgtctatctatctatctatctatctatctatccatccatccatccatcatctacatatctatctagagaaagacacagagagaggaagagagtgagggaacagagaagcacatagacacagacacagaaagagacaggcagagaccaatatttcaggtgaaagggctgagaagtttgggggtgtgtggtgggtaggggggtgcaatgggcagtggtagcatctgaggccccctgccagcctggtgtcagccttgtctatccccagatgcggggcaatgaggaggacatgaggctgatggaggatctgggccactacttccgtgatgtccaactctggtggcttgggtctttctaccctgtcctgcatctcgtccaccctacgttcactgcccctgtgctccaggcttcaggtatctttctcaggaggctatgctgcagcatcttccctgcctctgctccctgccttcccaacctttggacaggccatgctgagcagaaaaatggacatatccaatagagaccatggctctgccactaacctgctgggtgactctgggcaggtccctggtgctctctggctcctgaggcctcttttagttctgaatgaagaaaactcaaccctgtgtggtctaagcaaagaaacagaatgcattgactgtaaagtaaaagtcaggaagtaaaagtgaagtccaggaagggtggtcttcaggcatggctggatccaggccatcataatgccagtcttcatctcttagctttgtatccctctgtgatggtttcactctcatgctgctaaagataaatcccagaagctcaacccccatggaaaattccctgtagttccaggaaaatttccaggattcccctaaatttgcctggcctgggtcacaggaccaatttcttatccagtcactgcagcttgattgcataggtttaaggtcatatgcttagctctggagcaggggatgagaacccactcaactacttggattgagagtggggaaggcatgaggaggatggatgctggacgggcagataccaccattcaccagacatccattcaccagcatccctgtgagataggcatttcctgagtcagaaaactgaggtgcagagaggtgcaatgacttctcaaggtcacacagcatatcgaggcctccctcttagttctttttgtaatttttttgagacagggtctcactcattaatgcttattgtggagtgtggcaggatactgaggaagcctaaatcaagcctaggttacatgtgggatgctaataggaccagatttaaatcctatctggggcccatctatagggcatgtggaagtcattttagactctctcaggtccatgtctgagcatgccacatcaggacaggtcatgtatattgtgtcaatgtcagaacatgttaacgcatctcaggctatgccacatatctcaggtccatgtcagaagatgtcagagagtactgggcagacagggtgtcctaggtccttttttttttttttttttggagacagcgtctcactctgtcatcctggctggggtgcagtagaacgatcttggctcactgcaacctccgcctccctggttcaagcaattcgcctcccgagtagttgggactacaggcgcccgccgccacacccagctaatgtttttgtattttttagtagagacggggtttcaccatgttgcccaggctggttttgaactgctgagctcaggcaatccgcccacctcagcctcccaaagtgctagaattacaggcgtgatccaccgtgcccggctagggtgtcctaggtccttgtaaaggcattttgtagagcgttgagctatgctcaggtgttgcagaacatgttggaccatgtaggagccatgtcaaggcgtactggggtgtgctgtgccatgttgggctgtgtcattgttctactgcaccgctgcagcctggtctggtccccagtctcctcccctgtcctccctccttcctttgcccttgaccctcttcctgctatgctgggcctggagggtggaagtgcaaatccctggctgggagcctccccctacactcaaagtccctcccctgcccctctccataacccctgatggtccttattcatgtcagctgctgttgcactcaaggatatgagtttctatggcttcctgaagccctggctgggtgagtaactagatgaatggggatggggacaaccttctggggccaggggaaggtgctgtccttgcccatggcccttggctgcctctactaggggatgggctcctgattagtgccggtgacaagtggagatggcaccgccacctgctcacacctgccttccacttcaaaatcctgaagccctatgtgaagattttcaatgagagcacgaacatcatgcacgtgagtgccacaaactcggatcccagctgggcccttggaaaaggagaagtgacctcagacagatctggtctgaaatgctggctctgctgggtggctttggtgccatagctcttcctccctaggccttggtttcttcatctgtaaaatgtggataataatttctacttaaagggtggtcaagatcttgtaccgaagtcatgttcttggcacatagtaggtgttcagaaggcattaattactagtctccctcacagaaaccttgcaaactaataaagacagttatgatgaaatttggataatggcagggcgcagtggctcactcctgtaatcccagcacttttgaggccgaggtggatcacttgaggccaggagattgaggccagcctggccaacgtggtgaaaccccatctctactaacaatacaaaaaaataattagctggtatggtggcgcatgcctgtaatcccagctacttgggaggctgaggcaggagaattgcttgaatccaggaggcaaaggttgcagtgaactgagattgtgccactgcactcctgcctgggcgacagtgagactacaagtccaaaaaaaaaaaaaaattgcatatagctttttctgcatagcaaaccactttaaaactcactggccctggtgggccaaccagacacttccatttgtcccttattttccaggaggctagcctgggttcactaccaccatggagcctgagtttcaagagagtgagcagaaacattttagtacctcctgatgcttagttcagaactagcacactagcatttttaccacattctcctggtgaaagccagtttcaagaccagctcaaatccaggagatggagactcaggctctgcctgcaaatggaaggaggtgccaagtctcatcgccaagggtgaggggcaaaaagttggggacatttctgcaatcacttgcctctgtgctaatgatgaggatgataatgatagctaacatttattgagcacttagtgtataccagaaactatatgccaattccatgatctatgttgtctaatttaatattcacaatcctttgaggtagagatgatcataattgccacattatggatgaagaaattgtgggtcagagagattagggagcttgcctaagtttacacagttagaaagtgagctaaaagtggtggagaaggggttctaacctggttatctggcaccaaagcagatcatcttgttttgcttttttttttgttttttttttttttgagatggagtctcactctgtcaccaggctggagtgcagtggcatgatctcagctcactgcaacctccgcttcctgggttcaagcgattctcctgcctcagcctcctgagtagctggaattacaggcacctgccatcacatccagccattttttgtattttttggtagagacggatttcaccatgttggcccagatggtctcaatctcctgaactcatgatctgcccatctcaccttccaaagtgttgggattacacgtgtgagccactgtgcctgacccaaagcagatcatcttaactattactgaagatttgacaggggggacctaaagagggcagtgggctgaccaagggtacatagggcacagaagcagagctggaacttgaacccaggtcacccgaaccccagccttgggccttcatgtcctaatagtaacagcttctgtccctcacaagcttggtcctccttggggatgggtacccgggaaagacgactaggagttggttctgggggagtccatcctggaggttggggacgggaagggactcaggggagccagggctcagttcctgctctgtccccttctctggccaggccaaatggcaacgcctggccttggagggcagtgtccgtctggaaatgtttgagcacatcagcctcatgaccttggacagtctgcagaaatgcatcttcagctttgacagcaattgtcaggagtgagttcttccccaggacctgggatcttggccatggacccacaggagtaggttatggagagaggactgatcagggcatctgaagtgtcttcttggagaaaatgagtcagaattgagcatggaagtacagggaaggggagagagaaagatcagttctccaggtaggtagaagtgtttgggtaatggcaaggaggctaggatgagcagagcacgtgcaatggccatcaaggggacaccttggaaatgagattggaggggtcagcagtagctacaacttaatgacattgaaaagccatgcaaaggggtatgaacttcatccaaggctcccagggaatcatgggaggtatttgagaagatgagggtcatggtcagtgctgagcttggacgtttgactctgtggaagattgactgttatgtagacagaggaagcaaggagaccatggagaggaagaggcctgagcttggtggagaaaaaggggcagatttgagagaaaccaaggagaaataggcaggagcagatgttgtgtaagatgcccatgatggccaagctgtgccctggggcatctggggcaggaggcagctcacagagagtgggaggcagagagtgaagtgtgcttgcagggcacccttttctgcaccgaacgtggtcctgggattctggctagaaggtgctcccaggctttcatgtgtgtttagaagctgcttcctcttcctggcctgaccctgcgggaagcccagcgaatatattgatgccatcttggagctcagtgccctcagtctgaaacggcaccagcacatcttcctgctcacggacttcttgtacttcctcactcccaatgggcgacgcttctgcagggcctgtgacatagtgcacaacttcacagatgctgtcatccaggagcggcgtcgcaccctcactagccagggtgtcgatgacttcctgcaggccaaggccaagtccaagactttggacttcattgacgtgctcttgctggccaaggtgggctactctgggatctgaatttcagaagtagaatggactttgacgtgaaatgtcagatccatgaacttggacttgatccagagggcactggggagccatggaaggtgcttgaggaaaggagggacaagtaagatatattttagaggtgactctgtagaagagttcctagaaggagcaaacaggaggcaagagactgggaaagagtcctgctaggcaggtctaatgatgataagggaggaatcttgcctggaatatggatcttcatgaactgttttaggttagactcaggtgccttcatggctggtgtaatttagaggtcttgtcttgtctccaggatgaaaatggaaagaagttgtcagatgagaacataagagcggaggctgacaccttcatgtctgggggtgagggtcccagggtgtgatgtcactaggggtaggagtgtctccattccagggatgtggtgagtggaccctggatcaccccatcccatcttccttccccacttccttctgagggcctcaatacatgggtgctgtccacccttgggtgctgaagcagcccagagacccaagcttacctggctgcccctcaggccatgacacctcggccagtggtctctcctgggtcctgtacaacctcgcgaggtacccagaataccaggagcactgccgacaggaggtgcaagagctcctgaagaacggtgatcctaaagagattgaatggtgagtgtgcaggtcctcatgacctgttcctgagtccctctcattggtttagctcttcaggtgggaaagggagaaggtcttattggtgattgtgctattactgcctagtgggaattggtgcagagctcagaaacagggcctggtactcagcctggagcaaaggaaatgttgcaggatttttgcctttactatctattgcaattaaactcattcaattattttttcttttttgttacttctttcttttttcttttctttttttttttttttgagacagtctcactgtgtcatccaggctggagtgcagtggcataatctctgctcactgcaacctctgcctcctgagttcaggtgattctcctgcctcagcttcctgaggacctgtgattgcaggcatccgccactatgcccagctaatttttgtatttttaatagagacggggtttcaccatgttggccaggctggtctcgaactccagacctcaggggattcgcctacctcagcctaccaaagtgctgggattacaggtgtgagccacagcgcctggccaaacctattcagttctaatagatattgccgaattgccttttagagtctctgcactgattaactctccagtgtgttgtagaactagttctctttgtttcctcctttttgatagctgcatagtgttctctcataaggatgtactgtaattcatcaaaacatttctccattgatggatatttgtgtgctttccaggcttttgctataactaacatgatgtagtgggcacccatgtacactgaccattgcttacatctgtgagcagctttgcagtaccaattctgagaagtgcagttggtgaactgaagaccatttgagattgacaattcaatagctcctacacacacattttgagaatgccttcctcacattctcccctaaagtgtctattatgaaactttaaaacatttgccaatctgatagatgcaacataatacttcaatgaacatcactttaagcctgggtaaagttgagcattgttttcacttactgaccatgggtatttcttattctgtgaagtgtttgcacaatttgttccttctagtttgggttttgtagtttttttcttattgatttataagcactgctcacagattaagaaaactagttctttttttctgttttgcaaagttctttttcagattgtctttgaattaattgttggttttcattcatttattttggcttgattaatttatttgcagtcaaattctttcctttatacgtgccgttttttgttttttttattatttttattattttttttttgagacagagtcttgctctgtcacccaggctggacagcagtggcaccatctcagctcactgcaacctccgcctcccgagttcaagtgattctcctcctcagcctctcaagtagctgggattacaagtgtccaccactatgcccagctaatttttgtatttttagtagagatggggtttcaccatgttggccaggcctcaggtgatccacctaccttggcctcccagagtgctgggattacaggcgtgagccactgcgcctggccatgtttttgtttttttaaatcatgcatgggacattctttcatgctctaaaattaaaatgtaaaactcatgtttgttttcctctgatgggtttatttgtttttaaaatattttatttattattttagtttaaaaatatttattacttttttctctatgaagtctatgatagtataagaattgttgtaggaatgtattcattttcctccaaatggctagttgccccaacagaatttaatgaatattttgtatttgtcttacgattttaaataacagcagattcacaataagtgaaatttatttatatatttgggtctgtttcttgggctttattctgttccacttaattttatttatttatttatttatttatttattttattttttttttttgagacagaatcttgctctgtcgcccaggctggagtgcagtggtgtgatcttagctcattgtaacttccatctcctgggttcaagcgattctcctgcctcagcctcccgactaactgggactagaggtgcacatcaccacacccggctaatttttgtatttttagtagagacagggtttcaccatgttggccaggctggtctcaaatttctgatctcaagtgatccgcccaactcggcttcccaaaatgctggggttccaggcgtgagccaccacgcctggcccagttaattatatagtcatacataagcatcaagatgtcttcatcattatactttaaataacactttcatatttgataaaggtgatcctattttattactttgcttttacaagtttttctttttttcttttcttttcttttttttttttttttgagatggaacctcgctctgtcacccaggctgaagtgcagtggtgcaatctctgcctcctgagttcggctcactgcaacctctgcctcctgagttcaaactattctcctgcctcagcctcctgagtagttgggattacaggtgcccaccaccacgcccggctaatttttttgtatttttagtagagacagggtttcaccatgttggccaggctggtctcgatctcctgatctcaggtgatctgcctgcctcggcctcccaaagtgctggaattacaggtgtgagccactgcacctgacctgagcacctcttcttattgtcccacttatgcctagtgttccattattggaatgctaagcatgtgggagttattcatattctactgctccaggtcattgccaaggtctgattttcaaaattcaaaaaattgaaacctcaggcataaatgggttaaatctcttatagacctcagggcatccatgatttcttagatcatattcttttctacttttctcttgggtcacctgttctttctcttgttattttgcaggaattccttgtattctagatattgtagaaacctttgaatctctcatctgaatgttcatttggtccatggtatcctgtgttacacataattccttaattttcatgcatatttatcctttttctttttgatcttctactttgtcctttcgaggttttaagaattcccacccttaagtcacaaaagtgtttcttctgttatcttctcttaactttatagctttattcatctcatataggaagagattccatcctgtatatgaagtagacaaggatctggtttttttgttcccaaatttccaattgtttgaacatcttcctccaaatcatctatcaattgcccaggggtgtgtgggcccctctttaccagaagttgttaaattttcacctattcctgtgcctgactgcaagctctcttctctcttcctctggtccgttttcctgttcttgtagcagtaccagtcttttcttttcgtttcttttcttttcctttctttccttttccctccttccctccatctttctttctttccttccttctttctttctttccttctttctttctttcttccctccctccttctctctttcttccctccctccttctctctttcttccctccctccttctctctttcttccctccctccttctctctttcttccctccctccttctctctttcttccctccctccttctctctttcttccctccctccttctctctttcttccctccctccttctctctttcttccctccctccttctctctttcttccctccctccttctctctttcttccctccctccttctctctttcttccctccctccttctctctttctccttccttccttccttccttccttcctctctctctctctctcttgctttcttgctttctttcttggttttgctgtgttcccaagctggagtgcagtggtgtgatcatggctcactgcaacctccacctcccaagatcaaggggtcctcccacctcagcctcccgagtagccaggagtaaaggcacatgccaccacacccggctaattttttgtatttttagtagagacaaggtctcactatgttgcccaggctcgttgtgaactcctgggctcaagcagtctgcctgctttggccttccactgtgttcggattacagatgtgagccaccttgcccagcgcatttatcacctttttttttttttttttgacggagtctcagctgggctggtgagcagtggcgtgatctcggctctctgcaacctctgccttccggattcaagtgattctcctgcctcagcctccggagtagctaggattacaggcgcctgccaccacacccagctatgtttttgtatttttagtagggacggggtttcactatgttggccaggctgatcttaactcctgacctcatggctctcccgtggcggcctcccaaagtgctgggattacaagcttgagccaccacccctggccactttatcttttagaaaatattttatttcatttttatgctatacctttgtaatagatcataatatctggtaaattggatttatcttcttcaatcttttattttaattttatcttaactttttttttaagagatgggatctcactttatagcccaggctggagtgcattggcatgatcatagctcactgcagccttgaactcctgggcgcaagggatcctcacacctcagcctcctgagtagctgggaccacagacatgcaccaccaggcctggtggatcttttattcttaaattgacctagcttttgatgaactttaattcttccaattagaataagatggttaagttcctacaaaataaaatgctagattttttattgaattgctttgaatatgttgattaatttagaaagaaatgagacctttataatattaagtcatctcattctagagtgttgaggggattttattgaaacaattttgtaatctttatagagattttcccctcgtctttgttagtatattctattattaatttgagacagggtcttgctctgtcacccaggctggagtgcagtggcatgatctccgctcactgcaaactccacctcccagattcaagtgattcttgtgcctcagcctcttgagtagctgggattacaggtgcatgccaccatacccggttaatttttgtattgttaatagagacggagttttgctatgttggccagggtggtcttgaactcttgacctcaagtaatcaacccgcctcagctttccaaagtgctagaattacaggcataagccacagcacctggcctcattatatattttaaaacattttttaatgcaaataggttaacacttttaaggagaccctctatatgttgtgttttgcttagaaatgcttctaaaaataccatatcaagttttctaatacttttgcgactttggttttctcatgcttaaatccttgattcttctggaattcattttgttattggatttagggtcagagggaggttggaattgcctttgcaaaaattataactgaggacatcatgacagtgaaagagaacagacctaatcgactccatcttgcttgtaaccttcaagctgtctttgttcattcctgggcataggctgaactaactttgggaaggaattcagttcttggtttgagtctgaaaccaaattgataatagccctttcctgaaaacaccccctgtcttgataaatcggctctttctaggcagcaggcaaggtgaattcactgggcggttacaagttggtgcgagggtctctctggactgcaggagggctgtgtttgccccctggataattgttgggtgttaccttagggatgacctggcccagttgcccttcctgaccatgtgcctgaaggagagcctgcggctgcattccccagtctccaggatccaccgctgctgcccccaggacggggtgctcccggatggccgggtcatccccaaaggtgcccacagttgggcaggcggggagggctttgggcagggtggaggtcccatcgtgtagtggagtccttgtcctgactgcacctcctccccgacagggaacacttgcaccatcagcatctttgggatccatcacaacccttcagtctggccggacccggaggtgctaccccttccgccttctccatcccggggcctggtcaggggaggggtcttttcccagggaagcagatactccctctctactccacccacatgtgtactttttttttgttttgttttttgagacgaagttttgctcttgttgcccaggctggagtgcaatggagcgatctcggctcactgcaacctctgcctcccgggttcaagtgattctcctgcctcagcctccctagtagctgggattacaggcatgtgccaccacgcccggctaattttgtatttttagcagagacggggtttctccatgttggtcaggttgatctcgaactcccaacctcaggagtttcgcccctcagcctcccaaagtgctgggattacaggcatgagtcaccgtgcccggcttcacatctgtcttatatgcgggtggctgggtgtcctgagagacccccacccaacagccctaacttgcccacccaccaggtctatgacccctttcgcttcgacccagaaaatctccagaagacatcacctctggcttttattcccttctcagcagtgcccaggtgaggctaaggggcttctgaggcgggcatcgggtgagggtgccacaggtggaggcaaggtctgacttgtggggccacgtgtttcagggagtcgagggttttaataagatcccaggaaaagggggtgtgtgttctcagacttccccactcctacgtctgctggtctgggggctggagtctaagccaggctcggaggatatgcaagcccacatgggggtcccaggcacagagtccctctctctgcccctcaatcggatctgggtggggttgggagtcccagacgaggttcccggcgcgatggggccgggatgggggtcctgggcacagtcagagtccccaccccctcccccgggaactgcatcggccagacgttcgccatggctgagatgaaggtggtcctggcgctcacgctgctgcgcttccgcgtcctgccggaccacgcggagccccgcaggaagctggagctgatcgtgcgcgcggaggatggactttggctacgggtggagcccctgagcgcggatctgcagtgacccaccactgtcaggtctcagagccacccgcgccctcctcaggcacctttgcagattccggggaatcaatctgtgcctgagtcccacagacagccagcagggggcgtcggagaactgcagggatccagggcctggcgaggggaaggcggagtatttctgagccaagaccctgacagcctctctggttgagcacagtggccccgtgctgagggcgggttgtcccagagcgcaggtggggacagtatcctgtgggcgatagggagccatggcgggtgtttgagcaggagagggaccagggttgaggaggcacctatggggcaggtttgaggctctgagtcactgaggaaaaccagagcggcactacatccccgcccctcgatctcaattctcatctcctaatacatccagttgttttttttcctctcacctcagggttcttcaccgttttcattgttcttaaacgactgcacttattaaacaataataagcctggttgttttacagtgtgtctgatcattgaaagtacctgtatctattacaatgactgtcatttttgtcatggggtcagtgtttcggttatctttgcctggtattggctgccatatttgcatattagaaataatattcgtaggatttaaagaaggcagagttctctctctcttttttttttttctgaaacagagtcttgctctgtcacccaggctggagtgcagtggcaagatctcggttcactgcaacctctgctcctgggttcaagcgattctcctgcctcagcctcccaagtagctgggactacaggtgactgccgccacccccggctaattttttttttctttttttttgagacggaatctcactctgtcgccctcgctggagtgcagtggcgtgatctcggctcactgcaagttctgcctcccgggttcacgccattttcctgcctcagcctcccgagtagctgggactacaggcgcccgccaccacgcccggctaattttttgcatttttagtagagacggggtttcaccatgttggccaggctggcctcgaactcctgacctcaagtgatccgcctgccttggcctctgaaagtgctgggattaacaggcgtgagccactgtgctcagccagaagaaggcagctttgtctagggagcagtctttggaggactgctggttgaggtttatgttcatgaccctctaggcttgtggtgaccaaggtcacccaggaggtttaaatttaagctgaaatcacacttgcaagctgttttgctttatttttttctcactctgagagatgtagccctttgaggtctccacatatgcaaggaggggatttttaccattttccctccttgtatcacacctaggcttagaattttttttttcctgcaatcacaaaaccgttaaaagagtttcaaattttcctgatttgagaagtgccttcagagagaaggtatagtttatattcactttatctctaggtttctgttattatttgaatcatgtttttgtgatttttcactcttctttttttaaaaaaattattttattttaagttctgggatacatgtgcaggacgtgcaggtttgttacataggtaaatgtgtgccatggtgatttgctgcaatgtgactgcagcaatgtgatttgctgcatggtgatacctacccatcacctaggtattcagccccacatccattagctgtttgtcctgatgctctccctcctcctgcccccaccacaggccccagtgtgtgttgtacccctccctgtgtccatgtgttctcattgttcagctctcacttatgagtgagaacatgcagtgtttggttttctgttcctgtgttagtttgctgaggataatggcttccagctccatccatgtccctgcaaaggacctggtcttgttcctttttatggctgcataatactccatggtgtatatgtaccacatttcctttaaccagtctatcactgatgggcatttgggttgattacatgtcttcgctattgtttcactgtcttttcatgtcatttatttatatgaagaattgaagaagcatctaccttttttttttttctttttttgagacagagtctcattccattgcccaggctggagtgcagtggcttgatctcggctcactgcaacctccacctcccggattcaagtgattctcctgcctcagcctcctgagtagctgggattccaggctcctgccaccatgcctggctaatttttgtatttttagtagagatggggtttcaccatgttggccaggctggtctcgaactcctgacctgaagtgatccgcccaccccagcctcccaaagtgctggggctacaggcgtgagccaccacacccagctgcatccagctttttaaaaatgctggaattttgatccaaataacttagtttgctattaatggaagcaacaagtgtaaaacagaatgttaaattgtcatgatccagtgattgctccactctgggatgcgttagaactgataattgctattaaatttatagatttccacaccacacaagcccacatcaaaatgtgaagcagagtaccgcacatcaaggccgagtgcagtggctcattcctgtaatcccagcactttgggaggccgaggtgggtggatcacttcagatcaggagttggagaccagcccgaccaacatagcgaaaccccatctctactaaaaatgcaaaaatttgctgggcatggtggcacgtgcctgtagttccagctacttgggaggctgaggcagtagaattgcttgaacctgggaggtggagattacagcgagctgagactataccactgcactccagcctgggcaacagagcgagactctatctcaaaaaaaaaaaaattaaaaaaagaactgcacatcacccagaaatcctggactttgagctggcaggagggagcagatggaatttggatttgatttggcctcttgattgatctctgttttcagaacagaccccacggtcacgttccagctcctctcactctgctaatgtctttcattactgccaccatctgacttgcacttatgcaacccaactcttccccttctggagccaccttcctcttgctccctttcactaagatgtcccaacgggccatgttgcccaacccggataaaaggtggccgctcacttcccctttcagaagccgactcttgtccgtttctctccaccataccctgccctctgacttaggcctgctcttacctttgggggatgcggcctcggtgtgttcatttgtaaatggcaagattgatgggcctgttcacaagggcagtgggatggtgcacaggacacactagtacagagcctggtgcagaagctgctcccaggtgggagccaccatcctgatggacagttagggtcacctctgctcctctgcaggctgctgagaagggaaggttcctatgtatagacccttttccatgagaggaactgaagcccgggtggaccagccagaacatgaaaggatttggggaccagccctagcgcatatcctgaggccacactgctgcccacaaactgcccttgtggagcccactccatatgactctccatgggctggaaccactctcaggaaaagaatacatttcctctcaagccaaaacagacctctctgttggcagacagtgtgtcttctccctctgccctggaatgcacccttggggcttggagatgtccctgatacagaaggaacaggaggaagcagagcttccctttatccatgcagaatctagacactgtttactgctgaggctgcaccacagccagaggctgcaggcagacctgcgatcttagggttctccttagaatcagaatcaatagaatatatctctatctatgtttgtatctatccatctatctggaaagggaggtagagtgaatagggaatttattacaggaatcgtctcttgtgattagggaggctgagaagttctacaagatgctctctgtaagctggagaactagggatgcctggtggggtagctgcatctgagtccaaaggcctgagaacctggagttctcatgtccaagggcaggagaagatggatgtcccagctccagaacagagagcaaattcaccctctgcctttagatctatccatggagttgcagcaaactccttcaaagagtgacttatctttgcagagtcaaaggttgttttttttttttttttttttttgagacggagtcttgctctgtcaaccaggctggagtgcagcggcgcgatctcggctcactgcaagctccgcctcctgggttcacgccattctcctgcctcagccttccgagcagccgggactacaggcgcccgccaccacgcccggctaattttttgtattttttcgtagagatggggtttcaccgtgttaaccaggatagtctcgatctcctaacctcgtgatctagcagcctcggcctcccaaagtgctgggattacaggcgtgagccaccgcggccggccagtcaaaggtttcttttcccactccacctaggctttcagcttcctctaaggggagtgatggtttatgaaagagagagtgagtggggaggcagagggccagtgggcctctaggattctgctacacctgtgtatgtaattctagaaacattctcagggctgtgcgcagtggctcacacctgtaatccaaggactttgggaggccaaggcgggtggatcacgaggtcaggagttcgagaccagctcatccaacatggtgaaaccccgtctctactaaaaaatacaaaaattagccaggcgtggtggtgcacgcctgtagtcccagctactcgggaggctgaagcaggagaatcgcttgaacctgggtggcggaggttgcagtgagccgagatcctgttactgcactccaggctggcaacagagtgaaactccacctaaaaaaaataaaaataaaaataaataacaacaacgacaacaacaacaacagcaacaacaaaacgtactcaggcctgctcaggcctggtcttgtcatcggttgctgtggggcctccttcctctcttgaatgtgaaggaggcaccactggacagtttggggagaacagactcccaggtgtctggattattagtttgtctctgtgtttgtttgtgtgtgtgtgacagagagagagagagagagaggatgtgtgtgggtgtgcgattgtaggtgtgtgtgtgactgtatctgtgggactgcattcacagcgtgtgcaagtgtgtttgtgagtgtatgtaattgtgtgcatgggtggctgtgatcacatgtgcatatgtctgtattacaccgtgttggcgactgagtgtctgagtgtggtatgcatgtgtgagtgtgtgtatgttgttgtcactgagccactgtagctgtctacaccaggctgtgttcctattcatgactggagccactatcacagccactgtccttgaccccaggcctgacccttgcagtgcaggcagcacattctcatgcccttgaccccacatctgacccttgcaatacaggcaacacattctcatgcccttgaccttacatctggcccttgcagtgcaggcagcacattttcatgcccttgatcccatgtctgacccttgcagtgcaggcagcacattctcatgtccttggaagcagccctcaacaatgggtggtgagtattggtgggtaaatgccccagctccttttccctgagtgggatgactctgaggtgcatgttctatgctgtctcccagaggtgccatggagggctgagccttggctgcccatggtggaaactattttaaataagttccttttaattgctacatttcctttcctgtctcagttttcagctgtcctactggtgtttcctggacttacctcccaaacaaacaactggcagttgaaatttggtcacctctaaataaattatttgcacttgaatccttgcatcagggtctacttccaggaaacccaaactaagacaagcatgtctgctggcttctcccatctcaataggcttatcactgtgtcctttgtactgaagaggaacatgagattcagagaagacaagtcacttgcccaaagtcacacagctgattagtggcaggtccaggtttgaccatgggccacctaatcccaagcttggtgcttgctcctctcctgagagactccaccctactaaaggccagcggaaacaacataggaagttcgaagccatcaagggctttgctgcatgtgccagagggaaccaaggctcatagctggtgtctgtgtccttgtcctgtcattagagtaataatggcatgcacatgcttgtggctgattatgtgccagggaatgttgttgtaagcactttactcttttaaactcccttaattttcacaacaaccttgctatgactcctggttttcaggcaagaaaactgaggcacagagaaataaagagactggcccaaattcacacagctggttgagagttgaacgaagcagcctgcacctggagtccctgttcttcaccacgacactctctggcttctcacaagtcatatagatggagttctactaaatgtcaggcacgatgctaagcaatttcttttttgtttttgtttttgagacagtgtctcgctctgtcacctaggctggagtgcagtggtgcaatcttggcttactgcatcctccgcttcctgtgttcaagtgattctcctgcctctgcctcccaagtagtggtgattacgggcatgctccaccacccctggtgaagttttgtatttttagtagagatggggtttcaccatgttggccaggctggtctcgaactcctgacctcaggtcatccatctgcctcggcctcccaaagtgctgggattacaggcgtgagccaccgtacccgaccagcaatttcttttaaaatataatttgtaattatatatattagtaattataattaaacatgctgtacaacctcatataataaaaggaaacaattgctaagtgtaagcattgagaacaagaattctcccttcaaccccctgctcccattccgacagctgggagaatgcttatgatgtgcttatgtaaacttcagcacccacataactggtgtgttgagaggtcccatctttttggggaacgtaacactcgggtcctggcagggaacccacaggggctaaaggagggggtttaaggaggagccgtttgcaaaggtgtgggcagggccaaggggaaccatgagggatggtgcagcaccctggaggttaccatccaccgagagctgtcaccactcccaggctggtggtgccaggaaacagctgctcctggaaccaagatctgtggctgaaagaggagggcagaggacagacctcattctgctctccccactgatcatcagtggatctcccattgaccaaactgccatctgcttatatgactggagaggctgcaggcaggtgtccaaagcctcctgttgtggttcattcctgacaacgggtcagtgctggtccccccgatcccacagactgagatccactcagcttctctgccttgggtggcccccttgttcactgactaggcaggcacttgaatgaggaacaatattctgtctctccctgtactctcctcttttccctgtcacagggagggtctctgttgttcatgtcctgagtccctccatctagggctggtggctggtgttacaggaccaccaggttcatatccctgctgtgcaataacagaaaatacactgagacagaagtgtttgcagcagagaaaaagtttaatgatcacagggtggccgagctgggagacggaaggaactctcaaatacatctcccccaggagttctgggctggagtttttaaggactccatggaggatgagggattagaaaatgggggtcactgattggttgaagaaaggaggatgaaatcatcaagatgtggaaacttccttctttggtgagtgagcccctcatggggggctggctatgattcatgacctttattgtggtaaatggcactcaggaagcactttggcttgactatcaggccaaattttatcagcaccacgggcaagtttgcaggacgactcgttcctgtttaccccatgcaccccaagggaaattgctgaagtttctgtttatcttggtacaactaaagaaggatgcaagaatggacaaacttttttggccactcatttactcctcccgctgctgggtctttacacacctggcatgatttcatgggctggttcttatccacaggtgactcttccacatcactcaggtttctgctcgaaggtcacctcctgggggccccctgcctgatcaccgtgtccagaacagcccccttggtccctttctatctattcctgcagattaactgatgtcagtagtttccctgatatgcaaaacctgaaagaatatctcaaatggagaactcacatttcacaatgcttgagacgctgtctctagggcagttgaagaagtctataattttgtgacagggtctatgtgattctaaggcaagaagcagcaaacagctatgagggagcagtcagagaacaagctgacgtaatgattaatgctgaatgtgctgcagacttggttcattttttttcctcctcccttcttccatgattaattttataaagtgtataggtgatatggttgggctgtgtccccacccaaatctcctcttgtagttcccacaatccgcatgtgtcgtggaaggtacccgggaggtaatttaatcatgggggtggttactctcatgccgttctcatgatagtgggtaagttctcacaagatctgatggttttataaggggcttttcccccttttgcttggcacttctcgttgctgctgccatgtgaagaaggacatgtttgcttccccttccaccatgattgtacgttttctgaggcctccccagccttgtggaactgtgagtcaattaaaactttttccttattaaattaccctgtgtctttattagcagcatgaaaacagactaatacaatagggatgggtcactggtgagggtgctggggtcagctgttcaggaccagcaccacccaatagatcccacccatgaggggttgataccaactcttatgggtcatctggacttttctgaaactttcctggggctgtttttctccagctcatctgatctcctgttgcctctggcaaggtgctagccagtcagtctagctctggacatgccttgggaggctggctatgattcatgacctttattgtggtaaatggcactcaggaagcactttggcttgactatcgggccaaattttatcagcaccacgggcaagtttgcaggacgactcgttcctgtttaccccatgcaccccaagggaaattgctgaagtttctgtttatcttggtacaactaaagaaggatgcaagaatggacaaactttttggccactcatttactcctcctggtgctgggtctttacacacctggcatgatttcatgggctggttcttatccacaggtgactcttccacgtcactcaggtttctgctcaaaggtcacctcctgggggtcccctgcctgatcaccgtgtccagaacggcccccttggtccctttctatctcatctcactcttgtaatttctttcatcaccgtcaccattggatttggtcttatgatctgttggcttcctccatcagacaggaacaccaggttggcagtgttgactgaaattaaggctttgaggcagaaataattcaataaaggtttattggaagtcaaatgtgaggattgattgaggaagacacagtaatgaaattgagcatgctttaaagccttttataaattggaatgtttttgtgagaaggtttaggagaagggaggggaactcaaacaggagttgtatgtttttctttcccttccttctttccttcctttcttcctttctctctctctttttctttctttctttctttcttgttttgagacagggtctcactctgtcacccaggctggagtgcaatggcacaatcacagctcactgaagcctcaacctcctgggctcaagcgatcctcttgcctcagcctcccaagtagctaggaccacaggtgtgcaccaccaagcaaggttaattatttttttttgtagagacaggatctccttttgtttctcaggctggtctcaaactcctgggctcaagcaatcctcccacctcagcctcccaaaatgctgggattacaggcatgagccactgtgcctagctggagttgtctttttcattgcagggtataatatagagattataattattggctacaaatgacaacatataggctagaacattaatatatgtaaaacaatctgtacaactttatgatttagaaacaaatttgtgtctttttcaatgtcagtaggttacatattaagcatgtcgacagtttgaggaactcaggataaaatttgaggctggctatgattcatgacctttattgtggtaaatggcactgagtaagcacttggcttgactatcaggccaaattttatcagcaccacgggtaggtgtgcaggacggctggttctgccatgcattatttttcattcagggacaggaggtaaacgacgaatcataagatcttcctgggacggttactttggaagcctgccaaaggtgacttgtagattattagttctttggatagagaatcttttcaaggaagcagtgatgaccaatctctgttcaggttagagtaacaggggttatttatctttcgccattgggaaggctcatttgtaagaagtcatgtctttccaggctgaggagataaataattttgttattgcaggcaggtgaaattgttagtgacatggggcaggtcatgacttgaggctctgtgttttcttttgaattgcgagtcatatctagttgttgggcaaccattattttggtgttagctgttgatgaatagttttaaaattctagagaatttaggtagagagaaaggtaaatgttttaattttgtttataaaattgtgttttatccatttgttgtaagacatacatagtttaaaagaaaaaaatttttttattttggaaaacaatataaaaataattagcattgtgttaaatagaagctcatataaatcataaggaatggtaccagttcctccttgtacctctggtagaattcagctgtgaatccatctggtcctggactctttttggttggtaagctattgattattgccacaatttcagagcctgttatgggtctattcagagattcaacttcttactggtttagtcttgggagggtgtatgtgtcgaggaatttatccatttcttctagattttctaatttatttgcgtagaggtgtttgtagtattctctgatggtagtttgtatttctgtgggatcggtggtgatatcccctttatcattttttattgcgcctatttgattcttctctctttttttctttattagtcttgctagcggtctatcaattttgttgatcctttcaaaaaaccagcgcctggattcattaattttttgaagggttttttgtgtctctatttccttcagttctgctctgattttagttacctcttgccttctgctagcttttgaatgtgtttgctcttgcttttctagttcttttaattgtgatgttaaggtgtcaattttggatctttcctgctttctcttgtgggcatttagtgctataaatttccctctacacacttctttgaatgtgtcccagagattctggtatgttgtgtctttgttctcgttggtttcaaagaacatctttatttctgccttcatttcgttatgtacccagtagtcattcaggagcaggttgttcagtttccatgtagttgagcggttttgagtgagcttcttaaccctgagttctagtttgattgcactgtggtctgagagacagtttgttataatttctgttcttttacatttgctgaggagagctttacttccaactatgtggtcaattttggaataggtgtggtaaggtgctgaaaaaaacgtatattctgctgatttggggtggagagttctgtagatgtctattaggtccgcttggtgcagagctgagttcaattcctgggtatacttgttaactttctgtctcgttgatctgtctccaatccatagaaaaagagggaatcctccctaactcattttatgaggccagcatcatcctgataccaaagccgggcagagacacaacaaaaaaagagaattttagaccaatatccttgttgaacattgctgcaaaaatcctcaataaaatactggcaaaccgaatccagcagcatatcaaaaagcttatccaccatgatcaagtgggcttcatccctggaatgcaaggctggttcaatatactcaaatcaataaatgtaatccagcatataaacagaaccaaagaccaaaaccacatgattatctcaatagatgcagaaaaggcctttgacaaaattcaacaaccttcatgctagaaactctcaataaattaggcaatgatgggacatatctcaaaataataagagctatctatgacaaacccacagccaatatcatactgaatgggcaaaaactggaagcattccctttgaaaactggcacaagacagggatgccctctctcaccactcctattcaacatagtgttggaagttctggccagggcaattaggcagaagaaggaaataaagggtattcaattaggaaaagaggaagtcaaattgtccctgtttgcagatgacatgattgtatatctagaaaaccccatcgtctcagccccaaatctccttaagctgataagcaacttcagcaaagtctcaggatacaaaatcaatggacaaaaatcacaagcattcttatacaccaataacagaccaacagagagccaaatcatgagtgaactcccattcacaactgcttcaaagagaatgaaatacctaggaatccaacttacaagggatgtgaaggacctcttcaaggagaactacaaaccactgctcaatgaaataaaagaggatacaaacaaatggaagaacattccatgctcatgggtaggaagaatcaatatcatgaaaatggccatactgcccaaggtaatttatagattcaatgccatccccatcaagctaccaatgactttcttcacagaattggaaaaaactactttaaagttcatatgcaaccaaaaaagagcccacattgccaagtcaatcctaagccaaaagaacaaagctggaggcaccatgctacctgacttcaaactatactacaaggctacagtaaccaaaacagcatggtactggtaccaaaacagagatatagatcaatggaacagaacagagccctcagaaataacgccgcatatctacaactagctaatctttgacaaacctgagaaaaacaagcaatggggaaaggattccctatttaataaatggtgctgggaaaagtggctagccatatgtagaaagctgaaactggatcccttccttataccttatacaaaaattaattcaagatggattaaacgttagacctaaaaaccataaaaaccctagaagaaaacctaggcattaccattcaagacataggcatgggcaaggacttcatgtctaaaacaccaaaagcaatggcaacaaaagccagaattgacaaatgggatctaattaaactaaagagcttctgcacagcaaaagaaactaccatcagagtgaacaggcaacctacaaaatgggagaaaattttcgcaacctactaatctgacaaagggctaatatgcagaatctacaatgaactgaaacaaatttacaagaaaaaaacaaacaaccccatcaaaaagtgggtgaaggacatgaacagacacttctcaaaagaagacatttatgcagccaaaaacacatgaaaaaaatgctcaccatcactggccatcagagaaatgcaaatcaaaaccacaatgagatatcatctcacaccagttagaatggcaatcattaaaacaacagttgctggagaggatgtggagaaataagaacacttttacactgttggtgggactgtaaactagttcaaccattgtggaagtcagtgtggtgattcctcagggatctagaactagaaataccatttgacccagccatcccattactgggtatatacccaaaggactataaatcatcctgctataaagacacatgcacacatatgtttattgcggcactattcacaatagcaaagacttggaaccaacccaaatgtccaacaatgatagactggattaagaaaatgtggcacatatacaccatggaatactatgcagccataaaaaatgatgagttcatgtcctttgtagggacatggatgaaattggaaatcatcattctcagtaaactatcgtaaggacaaaaaaccaaacaccgcatgttctcactcataggtgggaattgaacaatgagaacacagggacacaggaaggggaacatcacactctgggggctgttgtggggtggggggagggggagggatagctttaggagatatacctaatgctaaatgacaagttaatgggtgcagcacaccagcatggcacatgtatacatatgtaactaacctgcacattgtgcacatgtaccctaaaacttaaagtataataataataaaatttaaaaaaaggtcaggaaacaacaacaataacaacaacaacaacaacaacaacaaaaagaaggtcatataaatcattttagtcttttatcatttcggtctcctataatttttattgtgtttgatgttggattaataatctttatgcataagtttttattggagttttgaacgtttttatttagtctatagatcattaaattattggaaatctgtgttgtagagtcttttataagaaaagtaattttggactgggtgcagtgactcatgcctgtaatcccagcactttgggaggccaaggcggatggatcaattcaggccaggagttccagaccagcctggccaacatggtgaaaccccgtctctactaaaaatacaaaaattagccatgggtggtggtgtgcatctgtagtccgagctactagggaggctgaggcaggagaatcacttgaacctgggaggtggaggttgcagtgatcatgccactgtactccagcctgggaaacagaatgagactctgtctcaaaaaaaaaaaaaaaaaaaaaaaagtaattttatactagagttggttgcaaatgtttttgggccaggcatggtggctcatgcctgtaatcccggcattttgggaggccaaggcggatggatcacctgaggtcaggagtttgagactagcctgggccacatggcaaaaccccatctctacgaaaaatacaaaaattagctgggcatggtggcggggacctgtactcccagctacttgggaggctgaggtaggagaatcgcttgaacctggaaggtggaggttgcagtgagctgagatttcgccactgcactccagcctgggcgacagagtgagtgagactccttctccaaaaaaaaaaaaaaaaaaagataatgaccagaattatcatgggcagcagcatcacatcagaatcatcagacttttataaattttatataatctttaggatatttatatttataacatttatataaatctaattttagaaaggattaacataattaaaattatgactgcaaatatattagatatttataaatttaaataatttttggaacatttatatcaataacatatttataaacatgactgaaggatctagtattatttatcatttgacaacatttttaatataatttttcaaatctaattatttaatctataaagacttattttaggattttgatcttggagaaacctgtaaaagatataaaaagatctaaacaccttgtcaaattagaatcataggccaggcatgggggctcacatctgcaataccagcactttaggaggccaaggcgggtgggtcgtttgagctgaggagtttaagaccagcctgggcaacatggtgaaacaccatctttacaaaaaatacaaaaattagctgggtgtggtagtgcacaccagtagtcccagctactcaggaggctgaggtgggaggattgcttgagcccaggaggttgaggttgcagggagccaagattgtgccactgcactcccgcctgggcgacagaacgagactccgtctcaaaaaaaaaaaacaaaacaaaaaaaacaaaacaaaacaaattaaaatcacaggtctttgtaaaataatatttatttaactagagtgatgatcaaaagactttacaagcaatagagaaaattatatggacgtgaaaatcttaactgttttattttattaatttatttttgagacagggttttgttctgtcacccaggctggagtgcagtggtgcgaccatagctcactgtagccttgaccttctgggctcaatctatcccactgcttcagcttcctgagtagctgggactacagatttacttccccacacccagcttttttttgtttgttttggagagacggggtttccctatgttgcccaggctaatcttgaactcttgagctcaagcaatccacctgcctcggcctcccagggtgctaggattataggcgtgaggcaccaggcctgtcctaactcttttgcagcttagtcttagtaagtaattaaaaatctgataaagataacacagaaattatttcaataacatgtaaactttttgtttttaaggccaatgaccaaaatgtaaagacaaacctcttgtagtgtgattgtggttttttttttgagacagaattttgctctgtcacccaggctggagtgcagtggcaccatcttggctcactgcaacctctgcctcccgggttcaagtgattctcccgcctcagcctccctagtaactgagattacaggcatgtgctaccacatcaggctaatttgtttttgtatttttagtagagatggggtttcaccaagttggccaggctagtctggaactcccgacctcagatgatccacccaccttggcctcccaaagtgctggaattacaggtgtgagccactgcgcctggcctgaatttttatttttagtaaccttaaattttagtggaaacttagaaagtaagatcttgagttgtctgtcacaaattagtatgttaaagagatgagctactttataatgtttagaaacatgtttttttataatataattttttcttttctttaacttttattttaggttcaggcgtacatgtgcaggtttgttacacaggtaaatggcacattgcaggagtttggtgtacagattatttgatcactaaggtaatacacatagtacccagttggtagtttttggtcctcaccttgcttcccaccctccaccctcaagtaggccttggtgtcgttgttcccttctttgtgtttatatgtcctcaatgtttagcttttatttataagtgagaacacacagtatttgcttttctgttcctgtgttagtttgcttaggataatggcctccagttccatccttgttgttgcaaaggacatggtctcattctttttttatggctgcatagtattccatggtgtatatgtaccacatgttcttgatccagttgatggacatttaggttgattccatgtatttgctattgtgactagtgctgcaatgaacatacatgtgcatgtgtctctatggtagaacaatttctattcctttgggtatatacccaataatgggattgctgggtcaaatggtaattctgttttaagtcctttgagaaattgtcaaactgcttcccacaatgcctgaactaatttacatccccacaagcagtgtataagcatttccttttctccataacctctccagcatgttattactatatatataatttttactttttaatcatagtcattctgactggtgtgagatggtatctcattgtggttttgatttgcatttctctaatgattagtgatgttgagcattttgttgtatgctttttggatacgtgtatgtcttcttttgaaaactgtctgttcttatcttttgcctacttttttaatgaggttgcttggtttttccttgtaaatttaagtttcttatagattcttggtattagacctttgtcagatgcatagtttgcaaatattttctcccattctgtaggttgtctgtttactttgttgatggcttattttgctgtgcagaagctctttagtttaattaggtctcatttgttgatttttgtttttgctttgttacaattgcttttggcgtcttcatcatgaaatctttgcagtcctatttccagaatggcatatcctaggttatctttcagagtttttatagtttttggttttacagttaagtccttaatccatcttgggttaatttttgtgtatggtataaggaaggggtccagtttcagtcttctgcatatggctagccagttatctcaacaccacttattgaatagagagtcctttttccattgcttgttttgtcagctttgtcaaagatcagatggttgtaggtgtgtgaacttgtttcttggctctctattctgttccattggtctataggtttgtatttgtaccagtaccatgctgttttggttactgtagccctgtagtatagttgggtaatgtgatgcttccagctttgttctttttgcttaggattgccttggctgctcaggctatattttgtttccatatgaattttaaaatagttttttctaattctgtgaaaaatgtcattggtagtttgataggaatagcattgaatttgtaaattgctttgagcagtatggccattttaacaatattgattcttcatattcatgaacatggcatgtttttccatttgcttgtgtcatttctgatttctttgagcagtgttttgtaactctagttgtagaggtctttcacctccttgcttaacagtattcttagttattgggccaggcgcggtggctcatgcctgtaatcccagcactttgggaggccgaggcaggcggatcacgaggtcaggaaatcgagactatgctggctaacacggtgaaaccctgtctctactaaaaatacaaaaaattagctgggtgtggtggcgagcgcctatagtcccagctactcgggaggctgaggcaggagaatggtgtgaacctgggaggcggagcttgcagtaaacctagatcgcaccactacgctccagcctgggtgacagagcgagactctgtctcaaaaacaaaaacaaaaaaacggcattcttagttattttattcttttgtggctattgtgaatggggttgcattcttgatctggctctcagcttggacataattttttcttaattagaaatgacccagatgtttaatgagtatctattatttaatttaacataactttaagattttgaattacacaaaaagtttttaataagcatttatctcatttatgcttacccaatttatttatttttaataggttgactagactatttatgaaaacttagatattagacaaagttagtcattatcaaaagttatgtatggttatgttaaacatttttatagcctgtgattatcaggtgttcacccgagtgagaaacttaaattaaaatatgggtattttgtcaacaactcagaagatttagctgtttttattaagctaacaatattaaatgtcttatttattaaaattgcacaaacaaagatcatttggttttgaccagatttatagtcttataacctttgtgtcaaacccaggcaccttaaaatatctagtggagagaaatacaaaactttctgaccagtaaactcagacaaaaatgtacgttgacaattttaaagacatttaaatgtttatcttatcaataatttgaacatcaacttatttattaaagacttctttaagtcatataaacttggaacatacttgggtttagtaatttatgagcactcatctatttataagtcagttttgtagcatatagatacaacatataacaatatatgtacatatatttaaacacatctaaacaaacatatacacacacataaagactttatagtatttattttagaattttagtcatgagagagtagcataaacttactagtttataaaagacagttggatccatattacagatgacaaaattggaacttgtttacatggcttaaactttgtctcaacagataacttaatgaaggctgtggatcaaaattttgggtaaagcaattcttatggcagtttgattttaaaaacatcttctgccccttttttctttagttctaaatgatcttagggttaacattttaatgtttatattttagttagaactgtctgaattgtcaaaaacacacacacacacaaaatctctaagtaattttgcattagcaataccataaacagtgagctttatctcaataccagtagaaaagttagcagatttaaagtgggcagaaaaaaaaacagagaacttagaaggctctgtgtgctaactctaaagttataagttgaccatctgagctctgaattccttttctttttctttttttcagaaggagtcttgctctgtcacccaggctggagtgcagtggcacgatctcggcttactgcaacgtccgcctcctgggatcaagtgatactcctgcctcagcttctcaagtagctgggactacaggtgtgtaccaccacacccagctaatttgtgtatttttattagagatggagtttcgccaagttggccaggctggtttcaaactcctgacctcaagtgatccgcccgcctcgtcctcccaaagtcctgtgattacaggcttcagccacctcgcccggccctgaattgttttagtgtaatctgtccatcaatttaaaatgtacagaagaaccagccatgatacatagccagctgtagtctcaaaaaaacctggcatatattaatgtttgagaattttattttgtttcttaatctcccagtttagaaaaaaatttttggatctgcattttttaatcttaagtttcattttctttttgtagttgttccatttgctcttttcgttttacatttatatatattttccccttttgagggaaggaaatgtgtgcattgtgaactcctaaaaatctctgcctaagagatatatgggagctgagtgaacaaggaaaaagggatgaactcatattgtttccggaaccaaactgggtctggctgcgttttcttgaggcccgataaggagaagcagacaaactaggaaagaaaggaatttattactgtaaccagacacagggagaaggccagagataattcaaacagaccaactcaaagagttacaattttcttagtgcttacataggttggggttatgtgcctatgtgccgtatatcattcgccttaagtctactggtaactaattttgtttcaactagaaggtcagaggcaaaaaatgctgtctaagtctgattaaaagggtcctagtaccttcaaggcctgtctactgtggtactggagtgactatttctttttctttctttcttttcttttctttttttttttgagacggagtctcactctgtcgcccaggctggagtgcagtggcacaatctcggctcactgcaacctctgcctcctgcgttctagtgattctcctgcctctgcctcctgggtagctgggattacaggcgtgtgccaccatgcctggctaattttgtatttttagtagagatgggggtttcaccatgttggccaggctggttttaaactcctgacctccggtgatctgcctgcctcagcctcccaaaatgctgggattacaggtgtgagtcatcgcgcctggcctggagtgattatttctatcttatctcctttacagcttgacccagagagctgccttagactctccaatgaatctattcaaacagctgcctctgttaccttgacttgtctcagattttgttacccgagatgggtcctggcactaggaatgtaagactgtctctattattttgacttgttccaggttagggagaagcctgtgcaaggctcctactgaccatatgtttcatttctagcttttatgtctgggcacctatttccctagtttggactatttgctcaatttttaaggcagctctgtggaaatctgtttgtgtaacacaagtgctatgcaggcctgtctgtgtgactgtcatgtaggcctggttgtgtggttgtcagggagaactctactgccacaatagcacacggggtaagaggaggggaaacagttggaggtttagaagcttctaagtcccactgaaagtctctcatttaatttttccggttctaagactagcaacttttttttttctttcctgaggggtgtctcgctctatcgcccaggctggagtgcagtggcgctacctcggcttactgcaagctctgcctcctgggttcaggtttacgccattctcctgcctcagcctccggagcagctgggactacaggcacctgccaccacgcgcggctaatttttttttgtatttttagtagagacagggtttcacagtgttagccaggttggtctcgatctcctgacctcataatcctcccgcctcggcctcccaaagtgtgggattacaggtgtgagccaccgcacccagccaagactagcatcttttttaattgcccacacaaataaatcacttaaggcatttcaaaaagatctccatttcagctattgttgcttataaccatcgtgggttaggcaggaccacttacctcagcacttgtaaatatgaagacttttaaaaataacttttcatggctgggtgcagttgtgtctggaattggtgggttcttggtctcactgacttcaagaatgaagccgcggaccctcgtggtgagtgctacagctcttaagggggcgcgtctggagtttgtcccttctgatgttcagctgtgtttggagtttcttccttctggtgggttcgtggtctcgctggctcaggagtgaagctgcagaccttcgcagtgagtgttacagctcttaaggcagtgcgtctggagttgttccttcctcccagtgggctcgtggtctcgctggcttcaggagtgaagctgcagacctttgcggtgagtgtcacagctcataaaagcagtgtggacccaaagagccagcagtagcaagatttattgcaaagagcaaaagaacaaagcttccacagtgtggaaggggacctgagtgggttgccactgctggctcctgcagcctgcttttattctcttatctggccccacccacatcctgctgattggtagagcccagtggtctgttttgacagggcgctgattggtgtgtttacaatccctgagatagatacaaagttctccacgtccccatcagattagttagatacagagtaaggacacaaaggttctccaaggccccaccagagcagctagatacaaagtgtccatggtgcattcacaaaccctgagctagacacagggtgctgactggtgtgtttacaaaccttgagctagatacagagtgccgattggtgtatttacaatccctgagctagacataaaggttccccacagccccaccagagcagctagatacagagtgtcgattggtggattcacaaaccctgagctagacacagggtgctgattggtgtttacaaaccttgagctagatacagagtgccgattggtgtatttacaatccctgagctagacataaaggttctccaaggccccaccagcctcagaagcccagctggcttcacccagtggatcccgcagcagggctgcaggtggagctgcctgccagtcccgcgccatgtgctcgcactcctcagcccttgggtggtcatgggactgggcgccctggagcagggggcggcgctcgtcggggaggctcgggctgcacaggaacccacggagacgggggaaggctcaggcatggcgtgctgcagtcccgaggcctgccccgcgggaaggcagctaaggcctggtgagaaattgagcgcagaaccggtgggctggcactactgggggacctagtacaccctacgcagctgctggcccgggtgctaagtccctcattgcccggggccagcagggccggctggctgctcccagtgcggggcccgccaagcccacgcccacccggaactccagctggcctgcaagcgccccgcgcagccccggttcccgctcgcgcctctctctccacacctccctgcaagctgagggagtgggctccggccttggccagcccagaaaggggctcccacagtgcagcggtgggctgaagggctcctcaagtgccgccaaagtgggagcccaggcagaggaggcgccgagagcgagtgagggctgttgggactgccagcacgctgtcacctctcgcagtggctcatgtctgtaatcccagcactttgggaagccgagggaggcggatcacctgaggtcaggagttcgtgagcagcctggccaacatggtgaaaccctgtctctactaaaaatacaaacaacaacaacaacaacaaaaaactagctgggcgtgatggtgggcatctgtagtcccaggtactcgggaggctgggatgctgaggctggagaatcgcttgaaccctggaggtggaggttgcagtgagctgagattacgtcattgcactccagcctggctgacaagcgcgaaactccgtctcaaaacaaacaaacaaacaaacaactttctccataacttttatgtataaacactggctgatgtacagtcagtcttaacaggacccatttcccatcctggttgttttgagtgagacaagctatgttgtggagcaagagtgccctaatgtgatcaaaaaatgataaaacgaaggaaagtttgtctctccccaaccccctagagaaaccattcacaaagatcctattttaccctgccctagaattcaacaaaaacccttaccttaaatttgtagcagtagctcttattctgagaacatcactgcacctcctagccaagggggaaagcagcttcaataaggcagaactttgcctaaaacaggaagttcgttgatttcaggagaaacttatctgttgcatccagcaggggcatcccagttgggggaacacgatggattccgtgcatgaaggttgaaacctgctcaggaaggtccagggtgaccagggaggccactctgaaacactgatgactacatcattttgtggagtgaaattaaagctgccgaggcagaaatactttgataagggtttatttgaagccaaaggtgaggatcaacccagaaagatgcaccaacacatttggatgtgtgccagaatcttttacaatttggaatgtttttataagaaagtttaggagaagagaagggaacttcttatatcagaattgtctgtttttattggagggtataatacagaggtcataatgattagatacaggttataacatacaggctaaaacattttgtatgtaaaaccatcagtgaaactttataagagagggcacagtggcttatgcctgtaatcccagcactttgggaggttgagacgggcagatcccttgaggagaagctcatcgctcctgaggccagtagttcgagaccagcctagccaatatggtgaaactctgctctactaaaaatacaaaaattagctgggcatggtggcacatgcctgcaatcccaacaactcgagaggctgaggcaggaaggttgcttgaacctaggagatggaggttgcagtaagatgagactgcgccactgcactccagcctgggtgacaaagaccctgtctcaaaaaaaaaaagaaaagaaaagaaaaactttatgatttataaatataaagcaaaacttcatggtttagaaacaaaggattgtgcttttccatatcagtggaaaatcagaacatcaacagttggaagaactcataagatctgagtaattaaagataagatttgaggaactcacaagattctttactcaggaacaggatgtaacccatgcatcaagagatcttttccgggggctaattgggactaatgtgactggtaggttatcagcagagaccacgtctgtcttgttcaacctgtgtcccaggtcctagcaccatgcctgctaccatttaagtgttcatgtgaagtttgttgttgagaaactaattacctaaaagttagaacttgacctttgcattttatcgaggaggctatgagactcagagggttacacagctagtgagtggcagagcctggacttgaactcagttgtgctgaagccagaatgtgttccttcctgagcattcaaggacagggaaggtgaaactccagctagtgggcagcccgtgtgcttgttctagggagactgcaggccgattcctgggagctgggtcttcatggtgacacagtaagaacaactcacctattggctgggcgcagtggctcacgcctgtaatcccagcactttgggaggccgaggtggttggatcacttgaggtcaggagttggagaccagcctggccaatatggtgaaaccctgtctctactaaaaatacaaaaattagctgggtgtggtggctcatgcctgtaatctcagctgctcgggaggctgaggtaggataatcgcttgaacctggtggggcggaggtttcagtgagccgagattggcaccattgccctccagcctgggtgacaaagtgagactctgtctcaaaaaacaaagcaaagcaaaacaaaacaaaacgaaacagaactactcacctatgttgtggatcaactgtgtccccactgtaccaaatccttatttatttaaaaaaatttgttttggacccttttcacaagatggtgccgaaagtgaagaaggaagctcctgcccctcctaaagccgaagccaaagcgaaggctttaaaggccaagaaggcagtgttgaaaggtgtccacagccacaaaaagaagatccacacgtcacccaccttccggcggccgaagacactgcgactccggagacagcccaaatatcctcggaagagcgctcccaggagaaacaagcttgaccactatgctatcatcaagtttccgctgaccactgagtctgccatgaagaagatagaagacaacaacacacttgtgttcattgtggatgttaaagccaacaagcaccagatcaaacaggctgtgaagaagctctatgacattgatgtggccaaggtcaacaccctgattcggcctgatggagagaagaaggtatatgttcgactgactcctgattacgatgctttggatgttgccaacaaaattgggattatctaaactgagtgcagctgcctaattctgaatatatatatatatatcttttcaccatatacatgcctctctgtcaatttctggttgggctgggaggccacacacagacactgacatgacagggcttgggcaagactcctgttctacttatccttttgaaatattcaccctgccactccaccatgtgtgatcactccagagatctttgtgactagagttagtgtcctaggaaaaccagaactcagaacttgcctccatggttgagggtaacaagaagctgtacaagaaccccttttatccctggaagaggctgtgtatgaaaccaatgcccagggtttgaagggcgttagcatccatttcaggggagtgtggattggctggctttctggtagcattttgtcctcacacacccatctactgtgtccaaccggtctgtctgcttccctcaccccttgcccaataaaggacaaggacttcagaggaaaaaaaaaattgttttaattattacatttatagcatcccagcttgaaaaacgaagcaacagagacgtgtagaaagttaaaaggtttctactccaattgtaatttctccaattccatcgtggtatgtgcattcttctggatttttttcagtgtgcatacacatgtgtacatacagacacatacacatacactcgtacgttttttatattgatgggaccattactcacatctttaatttggaacttattctctgctctctctccctgtgtctgatagaatgctggcaatgctttgtgatgctttaggagacacatttgtcagatgtgaagacttaggcttaggaattgatgggtggtgactgaggctggtcactctgtggtctggtgcactttcccactgccccactctgggtaggggtggaagggcccctgcagagaagcaccagcttctgttttcccatgagtgactcccctccctccaatactcactaggggactttccataagccaggctgtgtgatttggcccctgagatattcctggttggatgagaaatcttggggagactccagccttctcaggcacaaaactcccagagtagagagctccctctggactatctctcctgcccttggcctcaatttcctgttctgctacctggtccaggaatcaggacctcagtgatgaaacttggcttctcccaggctgcagagtcctgctggggtgtgagtccttgctcatggctcatgaaagttcaacatatgcttatggcttcaatattgggccagatttcacttcccaccttggccttcccaaggatgaattgtgtggtcccatgtgttggtgatctcagcatgaactgcaaaggaagaagaactcatgtgcatttttgcgcagctgggtgccgcatcccatggctgcccttggagggtctccctcttcattcatgtctctgctaaaaggtcacctcctcctggaagccctccctgattctctgatttattggattgtctgatttattggatcattgcctgtctctttacgtgatgtgatacctttgacagctgagcactcactgttgcatccccagtgcctggcacatagtaggtgctcaagaaacatatagttgcatgaacagccctgagaggcatagatttttctttttattttataactgaaagaagccctgagaatcagaaaggttaaggggttaactcccagcatccctgcaaagcctggagccaggaatcttaaaacaagtctacttaaacttgaaggattgtatagggatttcctggggttctattaagatgcaatcctgagttagtatttctggattggggcatgggattctgcatttcctgccagctctcaggtaatgctcatggcgcaggtccctggaccacactttgagtaactgagccttacagttaaagtgcatgttgccagctccttcccttcacctcctctttttgaggctctttcctctgaagactcctcctctgtccccctctaaagcccctcattccacatcccatctcccaaatgcaaaatctgagctcacagcaatttgggaggccgaggtgcgcagatcacgaggtcaggagttcgagatcagcctggccaacatgtgaaaccctgtctctactaaagatacaaaaaattagctgggcgtggtagtgggcgcctgtaatcccagctactcgggaggctgaggcaggagaatcgcttgaacccaggaagcagagtttgcagtgagccgagctcaccctccatcccgtcgcgccaatgcactccagcctgggtgacagcgcaagactccgtctcaagaaaaaaaaaaaaaaaagcctgagcccaggaggggcagtactgcccatcatcaaagcaaggacagagcagaaggagactccactcagggtcccctggctctgccttccactgtctcgacctcgtctgctctcagcttccctcagcgttacccttcacaggccccctctgtcctcctatgctgagcccagcatccaggttgctttcccagctggtctcgttatctccagaatctgaccctgggtaatccccagtggtgctgcattctttgttcctgctcctgtcagtcaggtctcagcctaggtcctgggctgctgggaggcaggacttgaattcctgccaggctggcagtggagggcaacaggcttctgtctctgaatctcctaaatctgcactgagaaatggtgcacagcattctcctggcccacatttggaggggaacttgggggatgttttgggagaaggcttggcctcacccagctcacctggcatctgaacacttcattcctttacctaccttcccctggtcttggaaaggcagggtggctgcacattttggggctcagatcaccattggctgccctccaacttaccctctgccttacatgagaggtaccaaggactgagtggccatgctcggtcaccctgaattggttcttctacagttatggtccccaccagtccccgggttttggttggctgccctggcacaaaggaggcatccaggctgtgaggattggctagtccagccccgcccagcctcctgaagtgtttcctagatctggggccaggagcaaaaacctcctggcaaaggaggagaggaggttgtgcgggacaaccttctcctgacagaaggtgccaggctgggggtggcagggctggatagggaggggcactgcccaagactgggatggctccagggagctggccctggtgatgggtgcttgcaggtaaccagaggtcaagttggctggtggttctagatgaggctgtctggtttctggtctctagtttccttgatctctaattttgtgtcacttctcctctcccctctcccttggcctcttcccctgagattccctgaatctccctccatgctcttaaccatgtttacccatcattggtcctggagctccccagcccctttcctaggcctcaggacctcaccctccatcccgtctgccctgcaggatgtcgctgctgagcctgtcttggctgggcctcaggccggtggcagcatccccgtggctgctcctgctggtggtcggggcctcctggctcctggcccgcatcctggcctggacctatgccttctatcacaacggccgccgcctccggtgtttcccgcagccccggaaacagaactggttcttgggtcacctgggcctggtgagtggcaggaggatggatctagtgtctcagggtggaagggtggaaatggggctcaggctgagggggtgggctcgggtctgggacggcagagaaactcactcattcctctgatcactcactcattcctcttcccactcattcctctcctcactcactcattcctctcctcactcactcattctcctcactcactcattcctctcctcactcactcattcctctgcgcactcactcattcctctcctcactcactcattcctctcctcattcactcattctcctcactcattcctctcctcactcactcattcctctcctcactcactcattctcctcactcactcattcctcttcccactcactcattcctctcctcactcactcattcctctcctcactcactcattcctctcctcacccactcattcctctcctcgctcactcattcctctcctcgctcactcattcctctcctcgctcactcattcctctccttgctcactcattcctctgctttgccatgccaagcctttctcatctccttgtctaggggaagtcacccctagactgttttgaattcttttcctgactgttttcagtacactagtgaacctctgatgggttcctgtggcagagtgggggttacgcagcaggtattcaccattatttccacattatccactgctgtactggaggcctcttgggctcactgtctagaacccactttctgcctggcccatttgcttgtgtccatccatctctgggctggagttttcccataggaagtagctatacaccccctaccctcacatcatgacacagctgggccagaagagagatgtgtgccatctccaccctcccccgtgcaggggcatcttctttatccccactaagctgtcccaatgagttgtgttgcccaacctggataaaaattggccagtgacttcctctttaaagttacctttgacccttcagaccctgccctttcacttagacctgctgtcccctttgggcgatttggcatcagtctgttctttggcaaatggcaggaatgatgggtgtgtccacaggtgcagggtgagggaacacaggacggactagctctgagcttgatgtgcaaaaggtgctccctggtgagagccgctgttcttcctgacagacagttagagccacctcttctcccctgggggctgctgagaaaggaagttccaccgtgtacagaccttctccatgggagggcctggggcccctgaggcccagccaggacataaaaggatgtggggaccagccctggggacatgtcctgaggccacattgctgcccacacaccacacttgtggagcccaccccacgtgactttccgtgggctggagccactcccaggatgagaaaatccatcctctttattcaaggtgggcttctccatgaacagacagtttgtcttccccctgttccctgggatgtagccttggaagttagatactgcccccaagagaagggagcaggagggagtggagattacccctatgtgcgcagaatctggacatgctgttcattgcagaggctgtgccacctctaaagcctgcagtgggacctgctgtggctcctcctgggaaatgtatttatttctccagagtaatagaattaataggatatcaatatctacatctatctatctatctatctatctatctatctatctatctatctatctatcagtccgtctgtctgtctatgatctatctaatctatggagagacagaagagggcatttattataggaattgactcatgtttatggaagctgaaaagtcccactctatgccttctgcaagctggagaatcagggacactggtggtgcaattccgtctgggtccaaagccctgggaacctggagttctaatgttcaagggcaggagaagatggatgtctcagctgcagaggagaaaacaaattcacccttcctccacttttacattctacgtggaccctcaacagattggatgatgcccacacagactgggaaggggagatcctccttcctcagttttccttcaaatgctaatctctcctgaaacactctcacagacatacccagaaataatgtttgactggatatctgggcatcccttaacccagtcaagtggacacaggaggtgatggcccttgccttgcttgcaggtcactcccacagaggagggcttgagggtcctgacccagctggtggccacctacccccagggctttgtgaggtggttgggccccatcactcccatcatcaacttgtgccaccctgacatcgtccgatctgtcatcaatacctcaggtactcctgcagagcttgtggtggtgggcacaggagaacattggagggcttctagatctcatccccaaagcttctgtgcagctcttgtagtactcagccccttccttcctgcttctctctcagccaccttcctctttccttcctgtagtcaccaaccccaacctcagtgtcttttctctctgctgccatcttccccacctccgtgttgttctgggaaccactggggccccgagaagccttaatccaaggccctgtcctggaggaatccccaaacttgaagagatggagcagtacagagacatccccaacttcatggggttcagaatgggccaggaggagataggctgtgacagagcataggagaacaaggtttctactggggcaggctggaaggcttcctggaggaggcgtagcaggagctgggtgtggaacgatgagtgataattttttttttaaagcaggggcagggtgatgcagtgggcattgttagtattcaaggctccgggccaggcttggcattggccttgtccttctgcaggcccagagcaaggacaagaagatgagaaggagttgtggttggtggaagatctaggctgctatttccatgacattcacctcttgtgggtcgattccttctaatcccatcctgtggcacttccaccatatgttcattgccctcttgctccaggccccaggaatctccaataggagacaccaccccagcctggagccgtacccttgccctctgcccttcccatctttggacaggccagggagagcagcagaaggggtatcacgccacagagaccatggctcaagccccaaaatgctgagtgactctgggcaggtccacggctctctatgggtgctgaggtgtctttccattgtgagtggtagaaactcaaccccacgcagtctaagccattaaagagaagctattgactgcaacatccagggaggttggccttcaggcacaactggatccaggtctcacctaatatcatcagaattctgtctttaactcttattctgtaaatgtgttttgtagagtgttgacttatgcttgggtgttgcagaacatgttggaccatgtaggagccatgtcaagacatgctgggtgtgctgtaccatgtcagggtgtatcattgctctatagtgttgttgcagcctagtccggtcccctttatgccccccaccctcctttcttcttctgcccatggcctccttcctgctatgctgggcttggagaaaagacgtccaaacctctggctgggagccaccctccatacccaaagtccctcctctattcctctccatggaccctgatggtcctcattcatgtcagatgccattacagacaaggacatagtcttctacaagaccctgaagccctggctgggtaagtaactgtaggtggacgggacggggaccaacttttgtggccaggggaagattctgcccttgcccacagcctttggctgccgtactaggggatgggctcttgttaagtgttggtgacaagtggagacaccaccgtcgcttgctgacgcctgccttccatttcaacatcctgaagccctatataaagattttcagcaagagtgcaaacatcatgcatgtgagtgccttgaactcagcatcccagctgcagccttggggtggagggatcacatacaattgggtctggaatgttggctctcctgggtgggtttggggccattgctcttcctctctgtgccttgatttccccatgaggctaataatcctcactaaaaggtggtaggagcatgtaatggactcatgtctctgacacttagtaggtggtcagaaggagtcaatttccacatttttctcacagaagccctgtaaactcaagaaaggaatgatgacacgtgcatagtagtcattgctgagtacagatcacttcaaaactaattggtttagagcaataagggtttatatttgctaacaaatctgtgggactgttggccagcccttctgcatgtggataggatccctcatggtataagagcagctgtgggtcaggtaggcagctttgcttgtgccagctcagttctctcacatatttggagctttgctggcttctggctgatttaggatggcctcagctgggacacctggacttttctccatgtgattctctgcctctagatgacaccccaggattgctcacatggcagagacaggattccaaggcagtgagaggaggatacaatgcttctcactagttattattatttattttatttttgagatgaagtctcgctttgtctcccaggctggagtgcagtggtgcgatcttggctctctgcaacccccgcctcaagcaattctcctgtcttagcctcgtgggtagatggaattacaggcgcccaccaccatgcccaactaattttttgtatcttcagtagagacagggtttcaccatgttgggcaggctggtcttgaactcctgacgtcaagtgatctgccctcctcggcctcacaaaatgctggaattacaggcatgggctgctgcacccagtcaacttctcactagttatggccttatcattttcaccacattctattggccaaaaaaagtaaaacgtccaccatgaatcaatgtggggcaaaataggctccatctcttaatggaagttgctaaaaaatcacattgcaaaagatgtggatgcagggagaagagaagaaatggagccaagcgttttgtgaaacgactaggatttttttttctcctgtgagctaataaattagcttgttacttttgcatggattctgccagaagacacgagacttctgggtcaaagacaaaagtttattactcatgtctcagcaagtggcatgtgcatcttgttggtttggatcctttctctaagccacccaaattccctggggtgataaggtgggcttctatagatgcctgccatgtagtatatttgcatgatggggaggagcattaggcttagagaatcagcttttagagcaagcagaataagcctaacgtgtgtcccagaggagccattaccttataccccaaggctgttctctgcaaacacaatgctgagaaatagcccagattaagaacctcagggttgaccgggtgtggtggctcatgcttgtaatcccagcacattggtatcacttgaggtcaggagttcgagaccagcctggccaacatggcaaaaccctgtctctactaaaaatacaaaaattagcagggcgtggtggtgcgtgcctgtaaccccagctactcaggaggctgagacaggagaattgcttgaacccagcaggcagaggttgcagtgagccaagactgtgccactgcactccagcctgggcaacagaacgagactccatctcaaaaactagcaaacaaacaaaacaaacaaacaacaacaacaacaaaacttcagagttttgcattcttggcatgctcagaaaaaaatgttcagggggatcacagggactttttgtaatcaatttataacaatgaagatgaatcaagataatatttattgagaactcatcatatgacagaaatgatgtaatatgcctattccatggtgtatgtggtctcatttaatttacaccgccttgtgaagtagaggatattttccaccctctcccccatgccatgacaaatggtgaaactgagggccagagaggttagagagatttcccaagttcacccagcttgtcagtgagtctaagagtgggggaaaaggggttctagcctggctccctggcatcaaagcaggtcatcttgattgctattgaggatttgacaggtgagacctagaggagggctgtgagttgaccaagggtacacacagcttaggaatcacagctggggcttgaacccagccatgggatcttcatctcctaatagtaacagcttccactctcacccaagcgtagtcctccctgaggatgggggtctgggacagaaaaccaggagcatgcctctgggggagtccatcctggtggttggggttgcagggggactcagaggagccaaggcctggccccagccctgctcccttctctggccaggccaagtggcaacgcctggccatggagggcagcacctgtctggatgtgtttgagcacatcagccttatgaccctggacagtctgcagaaatgcatcttcagctttgacagcaattgtcaggagtgagttcttgcccagggcctgggaacatgggatggagtgggggtgtgggtgtggggagagcaaagcccagggagacaagaagagccttcctggagagatgatgagaactaggcattgaaggacaaagaaggagagaaggagagagagagagagcgagagaaagagaagtttcctccaaacaagtggaactgtttgggtcaaggcaaggaggctaagatgaacagagcatgtgcaacaggcagttgggagacacttggaaatgaaggtggaggggttggcagttaactagatcttaaggatcttgaaaagtcagacaaagggagatgcattttatccaaggttcctaaggagccatggaggtgtttgagcagatgagagacatggtcagtactgagcttggacactggactctatgggactctatggaagattgactgtcatgtagacacagcatgcaaggatgccagggagaggaggtctgagtttggtggagaaaatggggcagatttgggagaaactgagtaataataggcaggagcagatgttttataagacagagagaggagatgcccatgatggccaagctgtgccctggggacctggggcaggaggcagctcacagagagtgggaggcagagagtgaagtgcgcttgcaggacacccctttctgcatggaatgtggtcctgggattctggctggaaggtgctcccaggctttcatgtgggtaaggagctgcttcctctctctggactggccctgcaggaagcccagtgaatatattactgcgatcatggagctcagtgcccttgtagtgaaacggaataaccagttcttccggtacaaggacttcctgtacttcctcactccctgtggacggcgcttccacagggcctgcagactggtgcacgacttcacagatgccgtcatccaggagcggcgccgcaccctcactagccagggtgttgatgacttcctccaagccaaggccaagtccaagactttggactttattgatgtgctcctgctgagcgaggtgggcctctctgggatctgaattcaagaggtaaaatggagcttcaggtcaaatgtcagattgaaggaccggacttgatacagagggcactaaggagccatggaaggtgctcgaagaagggagggacaagtcagataaattttagaggtgattgcatagaaagcttcctgggaagaacaaacaggaggtcggaaggaagcatgtgggggtagatctggaggtgacaagggagggatccttctgggataatgggtcttcagagactgtttcagtttagactccagtgaccccagaactagtgtgattggggttcttgtctccaggataaaaatggtaaagagttgtcagatgaggacataagagcagaagctgacactttcatgtttggaggtgagtgtcccagtctggggctacagtggggacaggggtctctccactccagggaagtggagggccggccctgaatcacttcattctgcccaacctccccctcccctcaaccttcctgagagcctcaatgtatgggcgctgtccaccctctgggtgctgaagcagcccagagactcaagcctgcctggctgaccctcaggccatgacaccacggccagtggcctctcctgggtcttgtacaacctcgcgaggcacccagaataccaagaacgctgccggcaggaggtgcaagagcttctgaaggaccgtgagcctaaagagattgaatggtgagtgcaggtgctggtggctctgcctttctgcctttctgagtccttctcgttggttcttctccccaggtgggggaaaaggggaggatctttttgatgattctgccattgttgcctagtgggaataggagtagagcccagaaacaggctagcaagggtaacattgcatgctttggggacagaatggtctgggagtccatatttatttccccactaacttgctatgcaagcttagtaaaatcaattcccttttctgaacaacttttctcctttgtaaattgggggtgtggggaattgctgtcccacagggctgcttggagaattaacggcaaataccgcaatgacttttggaccaatctaatattatgatttatcaaaacattctcttatcaacgcgtgtttttatactttccagccttttggtataaaagacatgatgtgttgaatatcggtgtacgatgatcattgctgacatgtcatctttgtagagcagattcctagaagtgcaactgctgagccaaagaccatttgagttttacaattcaatagctcttgggaaatctactgctatacacagattttgagaataccaaatttcctcataacctccccagaagtgcctattatgaaactaaaacatttgccaatctgatagatgcaatataatattttgttattttaatgaacataactttaaatgtgggtaaagttgagcactgttttcacctgccgatgagccatccatatctatttttctgtgaagtcagtttttgcgtaatttgttttttctactttgggtcgtactagttttcttatttacttataaaaactctttacatattaagaaaattatttcttttttctgttatgcaaaatgttgcctcgcattgtcttggactttatttttatttttggttcatttatttgtcaccaaatttattaattttttcttttataattcctgtttgtgtttcttaaaaaaatatttaaaaaccattttatactctaatagtaaaatgcaaaactcttgtttgacttattttaataggcttatatatttttaaaagtttaacattttatcaatatttttcacatttagaaatttttccctttgaaatctatgttggaatctattttttctccaaatgtctaattgtcccaaccaagtttaatgaatattttgtccttgtgtcatgattctaaataacaacaaattcacaagaaactatgtgtgtgtatatatatatatatagtgtatatatatagtgtatatatatatagtgtttgtgtatatatatatacacacacacatactatatatagtgtatacactatatatatatgtattttaaggcaacaaataaaaccatatatatatatgcctatcttaggcatgtatgtatatatatggttttatttgttgccttcattttgttccatttattatgtagtcctacatgagcagcatgaagtctacttttaaaaacactttaatatttggtagagtttgttctgtctcattactttgtgtttacagttttttttccctcgagttcctatttttttccatttgaactctgtgatcaggttagccagtttgacaaatacttttgaaaatgttaattaataaattttttggaccttaggtgctaatgtttgagttaacgatgctcttcaattcatggcaaattctcgtcatttttctatacaatacgtatttcttcccatttatctcaaatctctccttccagctctccatcagtatgattacaaaatggtggatacttttatctgtaaaacttgttgttggggtggatacattttaaaattctatatatgtttttatttcacagatgttgtgctggttcttaccttttcagaaatatagcactatgatttgtgctacgtttgcagcaccgtggttgcatgctatgatttgtgctatataaatgtagcactatgatttgcagcaccgtggttctaagtacatttattctcttgcttttagctatgatctagtccttttctcttcagttctgtagtggatacctggactgcttctatctctccagtgcaatgaccatctttgtgcatatctctttatctgcatgtctgataatttctctgggatctacagttgggaaccagcttgctgggctgtaaaacacacatctttccttggccatgtcctggaggttgccttccatattggcagcttctgtgcaccccactgtcagtgcatgtgacccctctacccacacctcagccaacccttggcaacacctacctttggccattctagcctcgaatagatgtgaagtggtacctcgttgtcagctagcttccatttctatgacagctagtgactttgcgcatctcctcttacatttctcatgtttgagcatccatgaattcttagatcaaatcctttgtctacttttcacttgggttacctgttcgttctcttgtagatttgcaggaattcctaacatattcagatattgttctggatatctatctatctatctatctatctatctatctatctatcttaggcatcttctctgaatctcttatctctcattggaatgttaattgggtccactgtatcttttactgcacagaaatccttaatttgcatgcgtatttatcctttatattttatcttgtttaagcttttggggttttaagaattcctactcttaagtcacaaaaatttctcctatgttatcatcttttaacattataattttacctttctcataaaggaaaagactccaccttgtatatgcagtagacaagaacctgtttctctctgttcccacatttccagtggtctgaacaacttccaccacactatccattctccaggggcgtgtggaccttcctttagcagatgttaagtttccccctattcacaggcctgattctgagctctctactctgttctatggatctgtttttctgttcttgcagcagtcccacagtttttttaaaattattttatttttattagtatgcatttgtaatatctcttaatatctggaagcttgggttctccttcttcaatcttttatttaaaaattgacctagcttggatagggcatggtggcttatgcctgtaatcccagcactttgggaggctgaggcaggcagatcacttgaggtcaggagtttgagaccagcctggccaacatggtgaaaccccatctatactaaaaatacaaaaattagttgggtgtggtggtgcacacctgtaatcccagctacttgggaggctgaggcacaagaatcgcttgaacgcaggaagtggaggttgcagtgagctgagatcaggccactgcactccagcctgggtgacagagtgagaatccatctcaaaaaaaaaaaaaaaattgacctagcccttgatgaactttaaaattccttcaattagaataagatttcaaagttccaaaaagaatccagctagatttttattaattgcatgaagtatattgattagtttagaaataattgacacctttacaacatatggtcatcccaccctacagtgtggagtggagattatttattcaaataactttataagccctttgtagagatgtttttttcctgcttttgttacctctttatataattttaaatactttttcacacaaacaaatgaacacttttgtttttgagatggagttgctctgcctcccaaactggagtgcggtggagtgatctcggctcactgcaacctctgcctctcaggttcgagggattctcctgcctcagcctcctgagtagctgggactacaggtgcccaccaccatgcgtggctaatttttgtgtttttagtagagatgggatttcaccatgttggtcaggctggtgtggaactcctgacctcaagtgatcctcctgcctcaggcttccaaagtgctgggattacaggagtgagccactgcaccccgccggaatgaatacttttaagagacaccctctgaatattgttttgctcagaaatacctctaaaaacaccaggtcaacttttcttctagtagttttgtgactttggttttctaatgcttacatctttgttgcttctggaattaattttgttataggactgagggtcagagggaggtggtgagagggtctccaggggcagcaggagggccgtgtatgctctctggataattgttgggtgtttccttagggacgacctggcccagttgcccttcctgaccatgtgcctgaaggagagcctgcggttgcatcccccaatccctacattcgcccgcggctgcacccaggacgtggtgctcccagacagccgagtcatccccaaaggtgccctccatggcaggggaggagggtcctgggcagggcggtggtcccagcaggcagctcggaccttgttcttactgtcctctcctgcacgacagggaatgtctgtaacatcaacatcttcgcaatccatcacaacccctcagtctggccagaccctgaggtgctgcccctccctgtttctccatcccccgggcctggtcgggggaggggtcttgtcccggaaaaccagatactccctctctactccacccacatctgttttatgtgggggtggctgggtgtcctgagaggccccatcagcagccttaacttgcctccaccccaggtctatgaccccttccgcttcgacccagaaaacgcccagaagaggtcacctatggcttttattcctttctcggcggggcccaggtgaggccagggggtgtctgaggtgggcatgggctgagggtggcacagatggctgccttgtcagatgcctgacttgtaggaccacgtgtttctgtgataggggttttaaagaagatcctaggaaaaagggtgtgctcagagcctcctgccccgtctggtttcagttggggctggggtctgggctaggctctgggaatatgcaagcccacatgggggtcccagacccagcttcccccctgtctgcccaaggtgatctgggtggggttgggggttccgggcctggttcctggcgcagtggggccgggatctgggtcctgggtgcagtcagaccttccaccttggcccccaggaactgcatcgggcagaagttcgcgatggcagagatgaaggtggtcctggcgctcacgctgctgcgcttccgcatcctgcccgaccacagggagccacgcaggacgccggagattgttttgcgtgcggaggacggactttggctgcgagtagaacccctgggctgaggcctgcagtgacccacccacctacctttgcatcacctacctttgcaccaactaccttttcagatttccggtaataaatctgtgttggcccctgtgcctcagtcccgcggatggccagtagggggcgctggaggactgcggggatctagggcctggctgggaagaggcggggagatgtctctgtgcccaagatactcactgcctctctgggtgagcacaggagccccgtgctgagggtgggatctcccagagtctaagtaaagactttttcccccccaaaataattgtgtattctgatataaatttttgccaatttagaatccctgttttttagctaggtgcatagcagcctgaaatacagatcacatttgaaagcctttcttgaagctcaattggttaagtgactgtggctgtcccatgtgtagaagccaaagattatgtggtaattctggtaacctttcttaagagaaagctgctacagtctgtctgctcagtcctcccctcttccttcctgctgcttggaagatttttttttttttttgagacatggtgtctctcgtcgcccaggccggagtgcagtggctcactgcaacctccacctcctgggttcaagtgattctcctgactcagtcgcctgagtagataggataacaggcgcctaccaccacacccggctaattgtatttttagtacagatggggttttgctatgttggccaggctggtctcaaactcctggcctcaagtgatcagcccacctcagcctcccaaagtgccagaattgcaggtgtgagaataaaaattcttgagtttcaatgtttattttagaatcaggtgctaacatgcaaatttattacaaaggtatattgcatcatgctgaggtttggagtatgaatgactccatcacccatgtagtgagcatagtatctaataggcagtttttcagcttttccccctccctgcttcccctgtctagtagtccccaggatctgttgttcccatctttattaccatgtgtatccaatgcatacctcccacttataagtgagaacatgcaatattttgttttctgttcctgcattagtttgcttaggataatggcccccagctgcatctatgttgctgcaaacgacatgattttgtactttttaatgactgcatagtatttcatggtgtatttctacacattttctttatccactccaccattgatgggcacctgtgttgattcagcatcttcgctattgtgattagagctgcgataaacatgtggatgcttgtgtctttttggcagaatgatttattttcttttgggtgtatacccagtcgtgggattgctaggtcaaatggtagttcaactctcaattctctgagaaatatcctaactgctctccacactccattagtttagtggctgaactaatttatatttccaccaacagtgtataaatgttcctttttctccatagccttggcaacatctgctattttttgactttttaacaaattgcttgcaagattgatgtggcctctggagctccatcttggctcatgaggacagggactgctatttagggcagatggggcagatggctagaagcagtcagggtctatgaccctagatccatgctgtgacctgaatgtttatgtagcccccaaatccatacattgaagcctagtctgcatatggtggtattaagaggggaggcctttgggaggtgattaagttgtgagggctctgccttcgtaagtgagattaccccttataacagagacctgagggagcttgtttgccccttccaccatgtaaagacacgtgcaaggtgccatctatgaggaacaggcccttagttgacactgaacctgcaggcaccttgatcttggacttcccagcctccaaaattgtaagcaataaatacctgttgtttataaactacctagtgtaagttatgttgtcatagcagcctgaatgggctaagataatccatatccccttggaattgtactaaacatcaccttgaagttgtattataaatgtcagaatcccagtctgctattcactagctgattggcttggggaaaacttgtttatctctgtagccctggttttgtttaccacttaatagtattcacctcattgggctgctggaagactgaacaagccagtatctacaacatccctgagccacatctgttgggtattagcggtccatgagggttaattgcctctctttctcttctttttgcatcacatttgaagttttgacattttaaaaaatcgcaagaggttgcttcaagctttgggatgcatggcaaccttctcttgaggaaaattcattcgaatgttttgtgtgctcaaaatatccgttattacatccgagaatctacagtggactttggtgaaaggttggcccaaagcttagaacggaaaaaattaatttttccagagaggcacgactcagaatttattcctgtctaaaaagttcaggtcatgaaggttttcaagtgagaggaaggtagagggtgtgggctgggcggggggcgggcggggggggggaggggccgcccctttcagcaccagggacagcggctgcacctggactttcccctgtctgactgtagggggctcctgcggggcgcagagtccaaggactgagcgcttttcaggggcccatagattgggaacctggaaggattattggctgcaaaataagaatggaacattgcaaaacgaaataaataactatttaatatattctatgctgaaagtcaatttttcttccctttaaagtttaagtttcataaataatgcatgcttatagaagaaattgcaagaaataaaaatcatccataatttcaaaatgtcagaataatcactgtttatattttcttgcatatgcttccagtttttaattcatatgtgatctttttacatatgaaaatgtttatttacatctatatagctgtgtcatatcacatttgcatgtaattttgtttacaagtgctattttcctgccaaatgagcacatgaaaagatgctaaacattattcccattatgcaaaccaaaagcacaacgtgatgtcacctcaacacctacaggatggctagcatctaaaaaagggaatataacaaatgttggagaggatatggagtaatcgaagccctcatccattcctggtgtgactgtaaaaatggtgcagctgctgtggaaaacagtctggagattctgaaaaactaaaacatagaattactatatgatgcaattccacgatatcatattaagctcctagctatatactcaaaagaatagaaaacagttgttcaaacaaaaaagcttgtacattcgtgcttatagcagccctattcacaattgccaaaaggtagaaagaactcaaatatccattaacagatggatggataaagaaaatgtgatctattcgtataatgaaatattactcagccattaaaaggaatgaagtactgatacatactaccacctggatgaaccttgaatacattatagtatgtgaaagaagtcagacacaaaaggtcacatagtgtatgatttatttataagaaatgtccatctgggtgtggtggctcatgcctgtaatcccagcactttgggaggcccaggcaggcagatcacttgaggtcaggagttcaagagcagcctggccaacagggtgaaaccccgtcgctactaaaaatacaagaaaaattagctgggcgtcatgggatatgcctgtaatccaagttacttgggaggctgaggcaggagaatcacttgaacccaggaagtggaggttgtggtgagctgagatcatgccatcacgccactgcactccagtctgggcaacagagtgagactctgtctcaaaaaaaaaaatgtccagaataggcaaatctatagagacagaaaggagattggtggtgtcaggagctgtggggaagtgggaagaggaagtgctaatggggtcaggatttcctgctgggtggtgaagatgttctggacctagatagtggtgaagtttccacaacactgtgcatataccaaatgctactaaattgtaccctttaaaatggtgaattttatgttttgtgaattttacccaaacaaaaaatgctattttatctcaaatttttgttaatttgggctactcacacgatatgctgttaacatctttccatgacatcaaatcattttatgaaacattattttgtggttttaacaaatatttgggttatgtattcaaaccactctatttcttaaaaatggcgtgatgttacaaaatgatataaaagtgctttgtctcacgttgcaagaattgtcttcatacaagttgacagtttgaggtatcattggttacaaattgagtaacttcatcaaataagttttggggtaaagatttcattttcaaagcaatagataacaactattttttgtctttctactcaatatatgggtagtttacataccgcagttacagtgttatagtattgtgtttgtctatgtacttacagtgagttttgtaccttcagatgatttcttattgctcattaacatcttcttctttcagtgaggaactccctttagcatttcttttaagacaggtctgcagatcccttaggttttgtgtgtctgggaaaatctttatttctccttcatgtttgaagaatatttttgctggatatactattctaggataaaagttcttcccttcagcactttaaatatgtcatgccactctctcagcatatgaggtttccactgagaagtcttctgccagacatattggagctcctttgtatgttatttgtttcttttctcctgttgcttttaggatcctttatccttggcctttgggagtttaattattaatctttttttttttttgacaggatctggctctgttactcaggctgtagtgcagaggcatgatctcagctcactgcaacctctgccccctgggcttaagccgtccttcaacctcagtctcccaagtagctgggactacagatgcataccaccatgcccggctaatatatatatatggtagatacagggttttgccatgttgcccaggctagtctcaaactcctgggctcaagcaatccacctgcctcggcaacctaaagtgctgagattacaggtgtgagccgccctgctcagcctaactattaaatgttttgagttagtcttatttggattaaatctgcctgcttttctgtaaccttcttgtacttgaatgttgatatctttctctaggtttgggaagttctgttattatcctgatctctctccacctcctctttaaggccaagaattgttaaatttgcccttttgaggctattttctagatcctgtaggcctacttcattttaaaattcttctttcttttatcttctctaactgtgaattttcaaatagtctgtcttcaagatcactaattctttgttttgcttgatcagttccgctgttgagggactctgatgcattcttcagtatgtcaaatggatttttcagctccaggatttctttggttcttttaaattatttcaatcttggttcttcttaattatttcgatctctttgttaaatttacctgataggattctgaattccttctttgtgttgtcttgaattttactgagcattctcaaaacagctattttgaattatctgcctgaaaggtcacatatctttgtcactctggaattgatcactggtgttgtatttagctcatgtggtgaagtcatgttttcctggatggtcttgatgcttgtgaatgtttgttgatgtctgggcattgaagagttaggcatttactgtagtctttgtggtctgggcttgttcgtacctgtccttcttgggaaagctttccaaatattcaaagggaattgagtgcagtaatctaagtctttgataaccacagctgtatctacacagggagcacctcaatcccagtaatgctgggactcttgcagattagtagaagtactgccttggttgtcttgggtaagatctgggaaaattccctggattcccaggcagagactcttctcttcccttactttcccccaaacaaatgtgtctctctctcgatctgtgctgatctgtctggagctaggggagggttgacacaaacacccctgtggcatctaccactgggactgtgctgagtcagacctgaggccaccacagcactgggtcttgcccaaggcacacagtgaccactgcttggctaccacctgtgttgactcaaggcccaagggctgcataatcagcatgtggtaaatctagccaggccttgtgaccttcccttcagtgcagtgagttccccacatatctggtgggtccagagatactgtccaggagctgtggcctggaatcagggactccaggtgctccatcccactgtggctaagctggtacccaagctgcaagacaaggtcccctttactcttacctctcctttcctcaagcagaaggagcttctccccgtggccactacggctgggaatgtgctgggtcacacctgaagcccgtatggcactgagtctcacccaaggcctgcaacaagtacaacccagctaccactgatgattattcagggcctatgtcctctttaatctgcaggtggtaaatcctgccaggactgggtccttcccttcaaggcagcatgtttcctttgtccaagagtgtgtttagaaatgttgtctgggagctagagcgtggaatgggagcctcaggatgctgtctggtgccctattcttctgtggctgagctggtatccaagctgcctctcctcaagcagaaggaagaagtctctcctggagcagcaagctgtgctgcctggagttgtgggagggatgatgcttgccaagactcccttggctgccctggctggtgcctcactaggttgtgtgcaccccaagttctctggctctgagcccagcgcagcaccaggacttgctccagaattgcagtccttgtagctggatttaccacatactgattgtagagcccttgggcctttaacaaacataggtggtagcctttcaagtttatttaggaccctggagcactttagcctgcaatggtggtactagctggaactcaggttctgaccactgggatggacaattcccttctgactagggctggcctaaatgcttcctctgtcggcactggctaaattctaccccatgttgctttctgctgtgacagggcagcactgagtttcaatgcaaagtcccatgatcactgtgctctctcccctccactcaagcacccagattctctctccagccatgaggccacttctgggagatggggaagtgttagtgtaggcaatttaagactcttttggccaggcacagtgggttactcctgtaatcccagaactttgggaggccgaggcaggcagatcacctgaggtcaagagttcaaggtcagcctggccaacgtggtgaaaccctgtctctactaaaaatacaaaaattagctgggcgtggtggcatgagcctgtagtcccagctacttgcgaggctgaggcttgagaattgcttgaacccgggaggcagaggttgcagtgagctatcgtgccattgcactccagcctgggtgacagagcaagattctgtctcaaaaaaaaaaaaaaaaagaaaaaaaagaaaaagaaaaaagaaaaaagaaaaaaaacctgtcttttgtacattctttagtgcctctttaaatttttaatttttgtgggtacatactaggtatatatgtttatgaggtacatgagatattttgatacaggcatgcaatgcacagtaatcaaatcatggagaatagattatccatcccctcaagcatttatcctttgtgttacaaacaatccagttacattcttttcattattttaaaatgtacgattaagttattattgactatagtcaccctgttgtactatcaaatagtaggtcttattataggtctaattaattctttctatctttatttgtacccattaaccatccctaacttcccctcactcctccactccccttcccagcctctggtaaccatccttctactctctatctccatgagttcaaagtacctctttttttgatatgatgttaaaaccagataccatgatcactcacctaatttttggttcttatgaaggtattttcttgtgtggatatttgttgtatttggcgttcctgtggaggagacgatcaatgacgcattttattctgccatcttgctctacctcctcctttttgtgattcagatgagactccttgacagctggtggctaaattttcaaatgcaatatttttggcagaaaatatattcactcatgtaaaaaataaaatgcacagtgaaaaatgtttcttgtacctatgcccttcatttatccagtctcgccgtctttacaaaggtaaacacttttactttttctgtatcctttcatagtatatttaggcaaataatacatgtaattaatctcctttgttcaggatgatgaattgccccccccccccacgatggtcagttcacctccctggggcacaactgtaaaaccctcacagctctagctgtattcagggtcaactccaccagccatttcatccaccatatgactcctacagatgagatacgtaaggtgcagacaggttgagagatttgcccaaggtcacacagccaggaaatagcagaactgtatccaaacctaggcctggtgaacatccacaataccgcatgcctcctgcatggtctcaaactccttctccttgtccttgcctgtggacagccccactcatcttaaaattacatttacggccaggcacagtggctcatgcctataatccaagcactttgggagtccgaggcaggaggataacctgaggttgggagttggagaccagcctgaccaaaatggagaaaccttgtctctactaaaaatacaaaattatctgggcatggtgctgcatgcctataatcccagttgcttgggaggctgaggcaggagaatcggaggcggaggttgctgtgagccaagatagggccattgcactccagcctgggcaacaagagtgagactccgtctcaaaaaaaaaaaaaaaaaaaccaaaaccaaaaaaaagcaaaaaaccaaaaaaacatttactcagtaggcactctttttttttttttgatgatgagtatcgctctgtctcctaggctgaagtgcagtggcatgatctcagctcactgcaacctctgcctcctgggttcaagcaattctcctgcctcagcctcctgagtagctgggattgcaggcacacaccaccatgcccagctaattttttgtaattttagtagaagcagggtttcaccatgttggtcaggctggtctcgaactgctgacctcgtgatctgcccgcctcggcctcccaaagtgctgggattgcaggtgtaagccactgtgcctggcccagtaggcactctttaagagcaggtgtcacacagtagaaactctatgtagaccatatgtagaccatgagtcacagagtgggcacactatgaagagcaggtggcagcagtaggcactctttatgtagagcaggcagcagtgagtaggcactctttatcaggagcagatgatactcagtaaacactctttatatagagcaggtggcatctgtaggcactctttatctagagcaagtggcattcaatgggctctctctcttttttatttttttgtgagacagagtctcactctgttgcccaggctggagtgcagtggtatgaactcagctcactgcaaactctgcctcccgggttcatgagattctcctgcctcagcctcccgagtagctgggatcataggtgcccgccaccacgcccggctaatttttgtatttttagtagagatggggtttcaccatgttggccaggctggtcttgaactcccgacctcagatgatctgcctgccttggcctcccaaagtgcttggattacaggcatgagctactgtgcctggccagtaggcactctttatgtattgcaggtggtactgagtaggcactttttatgtagcgcaggcaagagtaggaactcttcatgtagagcaagcagcactcagtaggcaccctttatgtacagaaggcagcccacagtaggtacactttatggagcacaggcaacactcgagcaggcagcactcaatagaccctctttatgtagatcaggaaacactcagtaggaagtcaccatatagagcaggtggtatcagtaggcactgtttatgtagagcacttggcactcagtaggcatgtgttatgtagacagcaactggtgctcagtgggcactcttcatatacagggggtggcactcaataggcactcactatgtagagcaggtggcacacagtaggcactctatgaggaatatcaggaactgagtatacagggttaatgtagagcacctggcacacagtaggcacactttatggaaagcacttggcacagagtagacaggatttagcacctggcacacagtagctgcccttcatttagagtattggcacacagtagaagtactttccatgcagcctttgtgcagagtagagactggcacacagcagctcaagtgctagttgccaccctttcccttcactcctttttggggctccctcctcttaggagccctcattgtcccccgctaaggccctcatcgaacatcccatttcccagatgggaagactgcacccaggaggggcagtactgaccaaagtcagagcaaggatgaggcagaatgaggactccattcatggttccctggctctgcccttcccctgcctggaccccatccgttccctctcatcctaaccctccacgtccccgctctgtcctcctatactgagtccggcctccagatttgcttttccagctgagctcttaatctccagaatctgacccaggtaatcctcagtggggctggattctttgttcccgttcctagcagtcaggtctccaacagggccctggactgcctggaggcaagacttgaactccatccagcagcagggggatagaggcttgtctcttccaggttgcctgattcagcatccagaagtggtacacggtgtcctaccggcccagggttagagaggagcacaggagatgatctggaacaaggcttggcctggcctggctcgcttgacacctgaactctcaagttcatgcttttatctgccacacactcagtaggtgctctttaagagcaggtgtcacacagtggaaactctatctgacccctctcggcttactctccaccttatgtgggaggtgctgagacctgaggatccagtgcctgtgctgtgtcaccctgagctggttcctctgcatccagctggtctcccacacccaggttttggccagctgcccagacatgggagcggcacccaggctgtggggattggctggcccagcccagcccagcctagcctcccacagccttccctacatcaggggccaggggaaaaaacctcccagaagaaggggagaggaggttgtgtgggacaaggtgctcctgacagaaggtgccagggtgggggtggtgggcctggggcatcctagcctgtgatggagatgggcactgggcaagggattgggcgcacacataggggagccccagccttcccacattctccattgctgcccaaggcccaggcagctcctggttgctggcttggaggatgagtggttttctaactgaaaccaagcccctggcaacgtcctaatgattcaggctgggcctttctggactttaatcagtttctctgtctttctcaatctaagtgcttaccgggtaactggaggccacttggttgctggttttggctgggcctttctggactttacccctcagcccctgtttatccatccctgtttactcttactgttctatctccagcactgcccgtctctgcctctctccactgtccctggagctccctgggcccttccctgggcctcaggacctcactcaccaccccatctgccctgcaggatgccacagctgagcctgtcctcgctgggcctttggccaatggcagcatccccgtggctgctcctgctgctggttggggcctcctggctcctggcccgcatcctggcctggacctataccttctatgacaactgctgccgcctccggtgtttcccgcaacccccgaaacggaattggttcttgggtcacctgggcctggtgagtgtggcagcaggacgggtctggggtctcagggtggatggacttcctgaggggtaagaatgaggctcaggtgagagggggtgggctggggtctggggtggcagagaagcaggggaggcgtcttactcattcctctgcttactcatttctgtgaggtgccaacccaagcccttctcacctccctgttctcccactcttggcctgtgttgaatccttttcctgcctgtctttccacattaatgcacctctgcggggctcttgggcagggggttgggtgcacagaaaggtgaacccctggcgttcccacattctccattgctggactcgaggcctcctgtacccactgttcagggtcctctccctacctggcctatttcctcttatgagggtataggtgggccagaggagaggtgtgggctgtctctcacctccaccacatccggaggcaccttcctcttatcttgttcctccccagtaagatgtcccaatggggtcctgttgccaaacccacataaaagttggccactcacttcccctttcagaagccttccctgacctttctcctcccccagaccttgccctctgacttagacctgctctcccctttgcggaacgtggtctcaatctgctcattgcaaatggcaggattgatgggtgtgtccacaggtgaagtgggagggtgcacaggatgcactagcacagagcctggtgcagaagcttctcccaggtgggagccactgtcatgatggacagttagagtcacctctgctcccctagtgactgctgagaagggaaggtcccctgtgtgcagaaccttctccatgggaggaactggaacctgtgtggctggtggaggaaccagccagggcatgaagggatgtggggaccagccttagggacatgtcctgagtccacactgctccccacaaacctcccctgtgaggacctcctcatatgcccacctctgggctgaaatgactcccagaacaaggaaatttttcctctcaagctaagtgggcctctgtgagtggacagtgtgtcttttccttctgccttgggatgcgctcttgggacttgggggtggccccaagagagatagagcaggaggaatgtagacagatagataggtaataggatagatggatggatggatgcacagatagggtgaatagatggctggctggctggataagtaggtgggtagatagacagatagatagatagataacaggatagatggatggatggacagatggatgcatggataagatggatggatggatggatggatggatggatggatggataatacatacataaagtagtagataagatggatacattaggtggatagataggtagagtggatatgtaggatggatagattagatggatggatagatagctagatgattgatagataataggataaatggatgagtggatgaatgtacagataagatggatggatggatggatggatgggcagatagatatatagatagaaaagttagataggatgaatagattagatagataaatgaatagatagataggtaggtagatagataataggctagatggatgaatggatgcacagataggatagatgaatggatagatagacagatatataagatagaatggatggattagatagatggatagatacatagaaacataggtagatagatagattagatagatagatagatagacagatagatacatacatacatacatatatagatacatagataggtagatatgtagagatatatataggtaaatagatagatagatagatagatagatagatagatagatagatagatagatagacagacaggcagacagacagatagatagatagaagagggagtttatttcgggaattggctcacaggattatagaagctgagatgcgtcatggactgctgtctgcaggctggataaacagacactggttgtgtaactgagtccaaaggcctgagacggtggagttctggtgtccaagggcaggagaagatggatgtgccagccccacaacagagcaaattagcctttcctctgcatttttgtgctacctgggctctcaacagattgaatgagctctgcccacactggggagggtgattcttccttcctcagtttaccaaattgaatgccagtctcttctggaaacaccctcacagacggatgatcaactatctgggcatcctttagcccagtcaagtggacacctagaattaaccatgacaggaggtgacggcccctgccttgcttgcaggtcacccccacggagcagggcatgagggtcctgactcagctggtggccacctacccccagggctttaaggtctggatgggccccatcttccccgtcatccgtttttgccaccccaacatcatccggtctgtcatcaacgcctcaggtaccacctggaatacttggtggtgggtgctatggtgcatttgaggcctgcaagtccctctatccccaagccgtgtgtggcccctgcagtactctggtctctcctttccttctctctcagccatcttcatctttctttcatgtattcactaattcccatctcagcatctcctctctccattgccatctgaccccctgtcctggtgttctgggctgccctggggccccaagagacctcaacccaaggccctgtcctggaggaacccccaagcttaaggaggtggatgtggacagagacatccccaacttcatggggtcaagaaagggccagagggagatggatgacagcccagagaagagcaagttctctgctggggcaggctggaagccttcctggaggaagagttactggagccatgtctggaacaatgagtagggatgtttgaaaggagagtgcagggtgatgcaattgggcatcgttagtgttcaaggccccttgccaggtctagcgtcaccttgcctgtcacaaaggttagaacaatgaggacttgtggctggtggaggatctggactgttatttctgtgatgtccatctctggtgtgggtcaagtccttttaccccatcctgtagtttgtctgccctaagttcattgcttttctgctctaggccctgggaatctccaaaaggagactccagcctagtttggggccctctccttgacccctgtgcttcccttcttggacaggccaggctgagcagggaaacaggcagcatcctacagagaccatggctctggcctcaaaatgctgagtgactctgggctggttcccagctgtctctggttactgaggtctctttcagttgtgagtggtggaaatccaacctggtgtagtctaagcaaagaaagagaatctattgattttaaagtccagggaggatggccttcaggcatggctggatccaggtctcacacagtgttacttcctctcttggctttagctttctccacgccacttttggcttgtcttcctttcttggctttagctttttccacgccacttttgctttcaagacagtctttccctcatgacgtcaacaatgagtcctagaagctcaattctcatgggaaagcccacatttcccccagagttcccagaaaaggcccatgatttacttctcctggcctggatcaccagatcaatttttcacccagtccctgtgtttctgattgcctagtctcggcaggcctgggccttctagagctactgttttgggggcacaaagaagtttgatggttaaggaatcaggccatgggtgcagatagacccagtctcaggcctcaggtttgccatggtctgggactatgggcaaattactttatcatttagagcctcagtctcttcatctggaaaatgggatgaatgagagcccagggaacatggtgtgtggatccacatggggaaagagcttttctgtctgtgtaactgaaggactggagagtcctgcatggaggatgtgaggaggaagcccagtgggggctcagcactgagagggagatgagatgctgcttgaaattctcagggagagggcttccacctcttccctgcagatccttctctctcgcagcctaggagagcatgaattgggtcctgtgtctttctctccagattcacagctcggaggaaggtctcctatacacacaaagcctggcatgcaccttcggtgatatgtgctgctggtgggtggggccctggcacgcaatcgtccgcatcttccaccccacctacatcaagcctgtgctctttgctccaggtagacactgcactggccactccaggtagacactgcactggccacgccttgcccacagctggggtctctgtgctgcctccagcgggtcgcgtgcccatgtgcagacaggaggggctgtggtggagatgccactgcttccatctcccctggacttccatctgtctgacctctgttcctgtttgctcatgtctgggaagtgtctctatggtggctgttatatggtcaagtctgctgtacggctacgtcttgtcacctgtatatttacacctgggtcctggttacacctgaaatatgttatacccggttacatctggtatatcattccaactgaggtcatgtagagctggtcatgtgtggagttcatgtgtggccaaggacatttggggcatgtgaggggctgttttgttcttgtcgcaggtgctgtttgacactgccgttttctcctgctggtcacatctgggccatgtttgggggttgtgtgaggtctgggacccagggtccctaagtgaactgtctgagacattatttgagtcttgtctgaggcatgtgttgtagtatgtttgggtcatacgtgaggaacagtctgggtcacgtgttggctatgtctgggtcgttaaaggtaccatatttatattcaacctggagcctgtatgtggaacacgcttttaaggtcatgttagaccatctcatgtgcatgttagagcataccatctcatgttaggaattgtcatgtattttgtggccatgtcaggacttgtgaacacatgtcagtgtcatgtctcatgtctaggtccatgtcagaagatgccatgtgagaatatgtcagagagtgctgggacagacagggtgtcctaagtccttgtgaaggcattctgtagagtgctgagcgtgttcagggtttgcagaacatgttggatcatgtaggaggcatgtcaaggcatgctggagccctgacatagctcctacgtgccatgttaggcagtgtcattgctgtgctgtgctgccgtagcctggtctggtcttccctcccctcccccatcctgccttcttcctctccccttgaccctcttcttgctatgtggggcttggagggaagaagtgcaaacctcttgctgggagcctccccccacccccaaagttcctccttcacctgcctccatggcccctgattgtcctcatttatgtcagctgccattgtaccaaaggacaaggtcttctacagcttcctgaagccctggctgggtgagtatctgtaggtgaacagggttgggaacaacctggggggccaggggagggagatgcccttgcccatggcccttggctgccctgccaggggatgggctcctgctgagtgctggtgaaaagtggagccgccaccgtcggatgctgacgcctgccttccatttcaacatcctgaagccctatatgaagattttcaatgagagtgtgaacatcatgcatgtgagttatttgaagccaaggtcccagctgcagcctttggttggggggaaccacagacagatctagtctggaattttggctctgctgggtgcctctgggccattgtcttcctctctgagctttggtttcctcatctgtaaaatccctacttaaaagaaggtcaaggtgatgtagtggagtcatgtctctggcgcatagtaggtgcccagaaggtgtctgtttctatgttcgcgtcacccgaaccctgtaaactcaagagggtaatgacaacaattgcataatagctgttgctgataagaaacaacctgaaaactcattggtttaaaccaataaaggtttatgaatcctgataagtctgtgggacagttcgtggattcttctggatgtggatggaagggatcagtcatggtacatgagcagcctggggtcaggtaggcagccttgctggtgttggctgagttctctcacatgtttgggttttggctggcttcagaccgatacagatggcctcagcttagacccctggatgttcctccatctgattctctccctccagaaggagtcccatggtttacaatacagatagggttccagggaataagatgaggcttagcttcattagttatcacctcatcatttttaccacattgtattttgacatcaaaagccaatagtccaacacggaatcaatggcagggggtaaaataggctctgtctattattgggagttgctgaaaaagcacattgcaaagggtgtggatatggggagaagggaagaattggggcgaaggttttgtgaagtgtttagaattttttaactttaaaattgatgttaagctagttactgtttcataaattattctggaagaacaagaaactcctgggtcagagacaaaggatagttttactactcatgacacagagagcagcatgtgttgcttgttagattgcacttcttctccaagcctctcaaatcccatgggctgacacaagtgggcttctataaatgcctgctgacatcatatattgcattacagggaaggggcattaggcttaggaatctgtttttatagcaagcagaagcagcatatccagggggtgtcccttatcctcaaagttattttctgcaaacacaactctgagaaatttttcaagttaagaacatcagcgtgttgcatttgtgacatgcccagaaagggtgctcaggactcatggaggactacctctacaaacctaggatatttttataatcaatttataactgcagatgaggaaacccaacatttattgagaactcacaatatgccagaaaaaatgccatgtgcccattccatgatacgagtatatattgtctaatttgattttaacaactctgcaaaggagagattatgtatttctgccccatggtagatgatgaaactgcaggtctgagagattagggagctaacccaagttcacccagctaatgagtgagcttggcatggtggagcagagtttctaacatgaattatatggctccaaagcacatcatcttaactgttcctgaatatctgacaggtgggatataggggagggtaatgagttgactaatggcacacagagcacagaggacagagctggaacttgaacctaggtctcctgactcccaatcttgggtcttcatctcttaatagtaacagcttttgcttgcaccataacctggtgctcccgggtaaagggtccctggggagaagatgaagaggcttattctggggcgtgcatattgattgttggggttggagagctgctcaagggagcaagggacctgccccagctctgtccccttctctggctaggccaagtggcagctcctggcctcagagggtagtgcccgtctggacatgtttgagcacatcagcctcatgaccttggacagtctgcagaaatgtgtcttcagctttgacagccattgccaggagtaagttcttgcccagggtctgggatcctgggccgtggacacaaagttggtaggtggggggctggggaggactgagcagggaaatcagacaaaccttcttggaggagttgttatacctgatcgttgaaggactggtatgaattttatcttgaggtttccagggactcattaaaagggtttgaactggtgggtgtggtcaaagtgggtctctctcagggactgactgtaatgtagcactaaatggagttaacactgatgcaaagaagctagggtggaagctggaccatggaccagttggaagaggataaagtctgagctttgtggacagcttcaggaaggagaaggggcaagactgtatactgggagggagagagggaataggagcataatgtgcaaactatcctctgggtgcctagctgcatggaggcatctcacagagatgggatgcagggagagataagagagcctggagagtcgatttcatgctgatccccatcctgcatctgaggggccatctgttcctggataccccgtttactgataggaggtagctcctagctgctggtgggaggtgatcctggggcttcaggtgtattaaattgttgcctccctttctgcccttatcctgcaggaagcccagtgaatatattgccgccatcttggagctcagtgcccttgtgacaaaaagacaccagcagatcctcctgtacatagacttcctgtattatctcacccctgatgggcagcgtttccgcagggcctgccgcctggtgcacgacttcacagatgccgtcatccaggagcggcgccgcaccctccctagccagggtgttgatgacttcctccaagccaaggccaaatccaagactttggacttcattgatgtactcctgctgagcaaggtgggcctctctgggatctgaattcaagaagtagaagggagcttcatgtgaaatgtcagatgaaagaatttgaacttgacccagagggcactggggagccatggaaggtgattgaggaagggagggacaggtcagagataggttttggagatagctctgtggactagcacctaccaggggactgctaaatgaaattgtgatgagtctgagatttactctatttataagttaataagctaattggccaccttttaatctatatatctacatctatacctatgtctgggtctatgtttatgtttttgcctatgtctttctgtatctttgtctctgagtttgtgtctctctctatgactatgactatgtctatgtctttgtctttttcattggccatatctgtatgtctttgtctgcatctgtgtcttcatctttgtttatgtttatgcctttgtgctctccctccctccctgccttctttttctttctttctttctttctttctttctttctttctttctttctttctttctttctttctttctttctttctttcttttccttccttccatctttctttctttctttttctttcgttctttctttctttctttctttctctctcttctctttctttctttctttctttctttctttctttctttctttctttctttctttctttctttttctctctctctctttcctttttttgacggagtctcgctctatcacccaggctgcagtgcaatggcatgattttggctcactggtaacccctgcctcccgggttcaagtgattctcctacctcagcctcccgagtagctaggactacaggggcacgccaccatgcctggctaacttttgcatttttagtagagacgaggtttcaccatgttggccaggctggtcttgaactcctgacttcatgatccatccaccttggcctcccaaagtactgggattacaggcgtgagccactgtgccccaccttgtcatgtcttttctatgtctgtgtttatgtctttttctatatctatattttcgttcttgtctatgtctatgtgtctgtgtctatgtctttttcttttctctgtgtttgtgtctttgtctcagtgtatgtctatgtccatgtttttttgtctgtgtctatgattatgtctatgtcaatgctatatctatatctttgtctttttttttttttgagatggagtctcgctgtgtcacccaggctggagtgcagtggtgcgatctcggcttactgcaacctccgcctcctgggttcaaatgattctcctgcctcagcctcccaactagctgggattagaggcacctggctaattttttgtatttttagtacagacggagcttcactatttttagtctcaaactcctgagctcgtgatctgcctgtctcagcctcccaaagtgctgggattacaggtgtgagccactgcacccggccatatttttgtctttgaatttgcctgtgcctgtgtctgtttttgtctgtccatgtttatgtctatgagtatttgtgtctgtgtctatgtccatgtctatgtttatgtgtatttgtgtgtctgtgtttgtgtctaagtctatgactttttccatgtgtttctgtgtctatgtctgtgtgtctatgtctttgtctatgtgtatgtctgttgtgacagaggcattaaatctctggatcagagcagctcatgtcttgcttacggcaatactatcagccagagtaggattgtggcactgactctccattcccaagtcaaattcctccaagggcaatgcgatgttttcccctgtacgtgcagcagactttgtaccctaggaaaggcaccctatattatgagtctcagcacattttctatagagagagagagagaggaagaaagagagagggcaccagctttgtgagagattatgtgctttgttctggatgccatattccatagacttacaactcaaatgtctccagggagataagattcatttaccactgtagaatgtgggcaaatatctttgaagcaatacttaatctctaatttccaagacaaattgccatttaattatcctgtaacccaggttgccagtgatttttttctcagaaagttttcatcaagcagaaacatgaaagcattcatgggtcattgagtcttcccattagggaccaaagaaaaggcaaggaagccagggaggaagcccatggggttggggctctggccatggtgaccaagaagggtctaggagagcaagatgggcttgggtttctcgaaagaggatgaatcttcagagactgtctcagattagactcaagagccctcagaggtactgtgactttttatgggggtgggggtggggggttattgccttctctccaggatgaagatgggaagaagttgtccgatgaggacataagagcagaagctgacacctttatgtttgagggtgagggccccagtgtggggctagagtggggacttggatatctccattccaggaacagggtgggtggacccctcgcacttcccatcccccttcccccatcctccctgaggtcctcaatgcaaggttgctgtacaccctcgggtgctgaagcagcccagagacccaagcctgccttgctgccccccaggccatgacaccacagccagtggtctctcctgggtcctgtaccaccttgcaaagcacccggaataccaggagcgctgtcggcaggaggtgcaagagcttctgaaggaccgtgagcctaaagagattgaatggtgagtgcaggtgctggtgccctgttcctgagcctgtctcattggctctgttccccaggtagggaggggagaaggggttgtttttgttgattctgccactattgcttagtgggaataggagcagaggaccacaggcaggacttagtacccatcctgactgtctgggcaaaggttataggcccttaggacagaaagacctgggcttctgagagaattgttgatgatatgtgaggacagataacgccacttagcatgtgttcagcaaatgaacttcccctccactctcttccttttctccaagaaatatttttttgaatgtcttcacttgttgaatgtttgctcttctgttccctaattcctacccttccatccagtccagggatttataagggagacctgggggtaaaattcatccattcttgtccagaacacctgcatcattcatccatccagtcctcgttcagcaaatactctcatactgcattccaacccccacatctgtgcacagcatctttctgtgctctggagacctgggaaggacccaaccagggatctattttccaggtgctcccagcctggtgggggaactgtccctgggcaggacagtcccagcccacgtgggcagggatggggtttacagtaagggaagcaggactaggggggtatagaaagtgtctcagttgaaagcctgaataatgatcagtagataattgggtacagttggggagcagtgctgtaggtcaagaagaccacctggggtcttcgggggaggaagagagagaggagagagagagagagagagagagagagagagagagagagagagagagagagcagggtcaggacagaaaggaggagaaggggagaaagagggagagactgacttgtggtgagatgataaaactggagatggtagcaggggctggctgtggaagccttggggaaaatgttaatggcttcagttttagcccaagggcaatagggagccatgagaagtgtttgaacagggagggacaagtcacatctgggtaccaggaagatctttctagggctagtgtggagggtgtactggagaggaccagctatagaatgagagcgcagtggggacattctgaggctcaagccaggccaggggctggaggaaggagaggaagcattggagtggacgggtgtcttggactcagtgtcctcccgtccatgcctttgcccagcacagcagtcctgggaagggaagaaacatttttatgcttctaaaataaagaatatttttgcaattttattttttaaaacacatttttattgatgcataatagatgcacatagttttgaaatacatgtgataatctaatacattcatataattgataaagatcaaatcagtgtacttgggatatccattgcctgaaatatttgtcttttctttatgctagaaacataactaacataagcaaactactttctaatgtacagtacatattgtaaactacagtgaacctactgatctatcaagtgctaggttttatttctcctatcaaaactcaaattcgtacccattaatcaacttctccttatccttccctcccctctgccaatctatcttcttttttcatgagatccactttttcagctcccacacgtgagtgagaacatgcgatatttgtctttctgtttttggcttatttacttaccacaatgacctccagttccatccatgttgccacaaatgacaaaatttcagtcttttaaatggctgaatagtattccattgtgtatacacactacattttctttatacattcatctattgatagacacttaagttgattccatattttcgttgttgtgaatagtgctgcaataaatacagaagtacagatgtctcttccatatatttattttctttctttgggatagaaatttcttctctttcttttcagtagtggaatttctgggttatatggcagttctagttttagtttcttgaggaacctctgtgctgttctctgcagtggctgcactaatttatattcccaccaacagtgtgtgtgagttcccctttctccatatcctcaccagcatctatcattgcctgtctttttgataaaagccattttaactgggatgagatgatatctcattgtggttttgatttgcatttctctgactgttagtgacattgagcatttttccatctacctattggccatttgtatgttttattttaagaaatgtctattcagatcttttgcccattttaaaatcagatatttggttacttttcctattgagttgtttgagctgcttatgtattctggttattaatcgcttgtcagatgagtagtttgtgagtattttctgccattctgtgggttgattcttcgctttgttgattgtttcctttgctgtgcagaagcttttttgcttgatataatctcatttctctattggctctgcttttgaggtcttacatagaaagtctttgcccagacccatgtcccggagtataaaaccaagatttcaagcaaaattatgcgtgtagtttaaaaaaaatggtcgaaagactttatgacaaaaatgaagttccttattaagctccaccttagcggtgactacagtcaacagttctctgtgtattcttctagaaaatggctatcccgatgcccacatttatatgaactcacactgtgacttttatttatatgaacacttactgtgcttttctttgtaagtgaaagtccataaaatagacacgggtctgcatattatctctgagatcttttgcttttctcaaaatatacattttggaaaatgagtttgtttttaaatttgttctttgtctttaattgacaagttttaattatatatgtttagaggcacagtatgatgttgtgatatatgtatacaacctgaaattattaaatcaaggtaatgaacaaatccatcacttcatgtgtttatcatttttgtgttgagaacatttgaagtttactttcttagcaatttcaactaatacaatacattgttcactaaaggcaccaggctgggcagcagatctcaaaaacttattcctgttgtctaactgaagcttctaccctttgaccaacatttcacccttctctgtccctcccccacccctggcctctggtaaccaccattctattcctatttctatgagctcaactattttaggtcccaagataagtaagatcatgtgtgtttgtctcttctgcacctggcttacttcacttagcatgagttcctccaggttcttccatgttgtggcaaatgagataattttttcttttttaaaggctaaatgggattccattgtgtatatatatatatatatacaccacatggaaaaacaacattaaattacaaaatgaatgataaaaaagagttcttcttgtaccaaatgagacattacagataagactagggttttccttgacaatcctgccacctgacctaatcctttctcattctccaaaggtgtttctagagccatagatttgtttatctatctatctatctatctatctatctatctatctatctatctatctatctatttctatcatctatcaatgtatctatcattgatctatctatcatctatcaatgtatctatcatctatctctattatctgtctatctatctatcatctatgtatctctgtatctatcatctatgtaactatgtctccatcatctattatctatctctctacttatttatctacctattatctatgtatctatctatatcatctatttatctatctatctatctatctatctatctatctatctatcatccatccatccatgatctatctctccaccatctatgaatcattcatttttataaatatatatccatatgcttcttgctgttttacatgtacatatgtatatatttgtcactttttttcactcaacagggtgccttaatgctatctttttctgagtgctgtatattttattccatattttattcagctcatttctatgttgaagaggacattaaacattttcaattatagtcaatatttccaatttgccttccagagtgtctgtactgatttaccttctagcctgcagtatgtggtgagactagtgatccctatttccttcttttgtgtaactgtatagtattccattgtgtggctgtttatctaaacattttcccattaatgtatatttggcttgtctccaaacttttgctaaactggacatgaagctgtcagcacgtgtgcacagtgaccattccttacatgcataggcatctctgcaggacaaattctctgaagtgcaattgctgaatcaaagaccatttgcactgtataatcattatttttttgagacagtttcactcttgttgcccaggctggagtgcaatggtgtgatctcagcttactgcagtctctgcctcccagattcaagcaattctgcctcagcctcctgagtagctgggattacaggtgcccccccaccatgcctgggtaattttttttgtagagatggggtttcaccatgttggccaggctggtctcgaactcctaacctcaggtgatctgcctgcctcggtctcccaaagtgctgggattacaggcatgagccaccatacaatatgactgcaaatcctttactattagctgagttttatggcacaaactttcccataactttaccaatagtactattgtattattgaattttaaatcttggccaattttcatatttcttcttttgatggacatttaaaaaaagtaagagtgaggctgaacatcttttgcacgtgttgatgttatttgctttctttttatggaactggtattcttattatttttcctctttttctttggaccctttaaaagtatttacttttaagaatgtgtattaagattgatttttttctgcctagtgttgcaaaatattgccttttaacttttggagggtacttttgattaatttttatgacgttaagtaggtccacatttttctttcacagctgtaaaatccatcaacttcccaggattttgtttagggtgggtgggggcccctttaccaaatgtgaagttttctcttattctcatgtctttttctgagctctttatgctgttccatgggtctattttcttgtttctgcaacagtgtcacactgtttttattcctgcgactttgtaacaattcttttaaaaagtttatttcgttacagggagaaaaggtctcacttgcaaacagagagaagctggagagttgtgtctttgctcccttgataaggattggggctggggtgtttccttagggacgacctggcccagctgcccttcctgaccatgtgcattaaggagagcctgaggctgcatcccccagtccctgccgtctctcgctgctgcacccaagacattgtgctcccagacggccgggtcatccccaaaggtgccacagcctcagggggaggagcctcctgggtaggaagaggggcccctcaggcagggagcattgtcctgactgcccccttctctcccacaggcattatctgcctcatcagtgtttttggaacccatcacaacccagccgtgtggccggaccctgaggtgcgggccccccgtctctgtttttgtccattccaaggctcctagaggagggggcagggttttgatcaggagaatccaacatcacctccctccaagacacacaccactgtctctccaaggctggcggactgggagaccccacccggcaacccttcttggtctcgcctccaggtctatgacccctttcgctttgacccaaagaacatcaaggagaggtcacctctggcttttattcccttctcagcagggcccaggtaagagcggcctgtgtttgaggcggggacggggagataggtgcaggggtctgggcatgacagtggggaaaagggggacattgtagacggtccgagttccagctctccttccctcacctcctctggagtttatgggaaaaggcccacagagtaggattgggttggtcctagaaggatccctagtgagctcagagctccctcctaccccaccttggtctaggctggggggttggagctcggctaggctcgcaggatatgcaagcccacatggggatccaggcacggatacccccttctctgttcctcaaactgctctaggtggggttgggtgtcccaggccaggttaccggcttgatggggccaggatggggcacctgggtgcagtcagagtttccacctccctccccaaggaactgcatcgggcaggcgttcgcgatggcggagatgaaggtggtcctggggctcacgctgctgcgcttccgcgtcctgcctgaccacaccgagccccgcaggaagccggagctggtcctgcgcgcagagggcggactttggctgcgggtggagcccctgagctgagttctgcagagacccactctgaccccactaaaatgacccctgattcatcaaaagtgaggcctagaattaccctaagaccctgttccacagtcctgtattccatcctagatatctactcaaaataattgagacaagtgttcaaacagaaagacgcttgtgcgtgaatgttcatggcagccctattcacagtagccaaacgatgaaaacaaccccaagctatatattaccagatgaaaggataaacaaaatatggtccatccatacaatggagtattacacagccataaaaaggaatgaagcagtgatccccactacactgtggatgaaccttgaatgcatgatactgaatgaaagacatcagatgcaaaaggtcacatagtgtactgtccttttatatgaaatttccagaacaggccaatctgaagagatgtatagtggattggtggctttcagcagctgtggggaggtgggactgaggagcgactgctaatcaggatggggtttcctcctgggatggtgaaaatgttccggacctagatagtgatgaaggtagcacgacactgtgagtgcactaaatgctattgaattggacactttagaatggttgaaatagtgatttttatgtgaattctacctaaacatgctattacagctcatatatactttttccatctggattcttcacaaaagaatatgttgtgagcatctttccatgatattaaatcatcttaggaaacattattttgtgttcttcaaaatgtgcatgttaagtattcaaatcagtcttaaatttttaaaaatatgtaattttagaaaataatttaaaaggttttgtttcagtttgtaagatttcttttctggcactttaatggcttgaggtatcattatcagttacaaattgagttattcttcatcaaatgacttttggagtagagattttatttttatagcaatagatgcacagatattcctgtaagatacaggtgtggttagacacttttctagaacaggcatgccctgcaaactccacagacactgactgtttttgtcctattaagaagtagaccactgagaagggagaaggtgacattttagctttcccaggtaaaagtggttttcatcctcacaccaattttatggactggacgttaactctcttgctcaaggtcactctgagtggaagagtggggataaatctggttcgtttggcatcagaggccatgacttttcctaccacagaagtaattttcaaagtaagtctctgccctaggcacatcagatcacctggggaccactccagagtgagtagacaagactttgacaggggtgcctaatttttttttttttttgagatggagtctcgctctgttgcccaggctggagtgcagtggcatgatctcagttcactgcaacctccgcctcctgcgttcaagtgattgtcctgtctcagcctcccaagtagctgggattacaggcacccaccaccacatccagctaattgttgtatttttaatagaggcggggtttcgccatgttgcactggctggtgttgaactcctaacctcaggtgatccacccgcctcggcctcccaaagtgctgggattacaggcccggtccagtttgatagtttgttatcatgttatacgtacacttagaataatgatccagccatctcattctaacagcaatgagaacttaggctcccctctctactaaaatacaaaagttagctggtcatggtggtgcgggcctgtaatcccagctactcgggaggctgatgcgggagaatcacttgaaacccacaggcggaggttgcagtgagctgaggtggtgccactacgctccagcctgggggagggggacatagcgagactcggtctcaaaaacaaaacaaaacaaaacaaaacaaaacaaaaacaaaacaaaacaaaacaaaacactgccaaactgtttccaaagcatctgcatcgtgtttaatttccataagtaacgtatgagaattctaggtcctccaaataattagcagtccttcgtagtgtcagtttttgtttcagccttccttatgggtatgctgtggcatatccctgagattttaattcgcattttccagtgactaagggtgttgaaccactcgtgccttcctgtgcctatttgacactcctatattttctttggtgaagtgtctgttcaatcatctgctcattaaattttccttcggttgtttgccttcttattgttggattttgagagttctatgtacaagtcctttgtcagtcgtgtgatttgcaagtcttcttcctagtctctgaagtttctttctttcatagagcaaacgttttaaatttttatgaagtaagacttctcagttttatttttggtgaattatgtttatactgccatatataggaactctttgcttaactggaggtcatggagattttctcctacattttcttttaaaagttttatagtttcagagtttacatgtaattccataatctccatttagttaaattttgtatggggtgtgaactgtggtttgactgttttcttgtatatggatatccaattgtttcacacaatttttttgaaaagaatatccttggcagggcacggtagctcacacctgtaatcccagcactttaggaggtcaaggtgggcagatcatgaggtcaggagtttgagaccagcctggccaatatggtgaaaccacgtctctattaaaaatagaaaaattagccaggcgtggtggtgtgtgcctgtattcacagctgcttggatggctgaggcaggagaatcgcttgaacccaggagtcagaggtttcagtgagccgagattgtgccactgcactccagcctgggtgaaagagctagattctctctctcaaaaaaaaaaaaaaaaaaaaggaaagaaagaaagaaaagaaaagaaaatcctttttgctttaacttgccttgcaggtttgtagaaaactcaattgttgaaatttgggtggatatatttctggattttctattctattccatgttggaccaataccacactgccctagtcactgttgcattatagtatatctttaaaggagtaatgggaatccttcaactacattttttccccaataatttttggctattctgcttcctttgtgtttctatgtaaattttatcatcagtgtgtctatttctacaaatagtcctgatagggtttgaattgggatttctgtgaatctatagatcaatctgaggagacttaataatgatattgattctcccaattcatgaatatagtatacccctgtatttatttgttttcttgaatttcttttatcattgttttgtagttttcaccatgacagtcttgcacatattttgttaaatgtacagctgagaatttaattttttctggtgtacaatgctaataaaatggtgctttaaaagatgtgttcttcagttgtttattgttaatacatggtagaagtttgtatcctgtttttgtaaaaggccacatagtcaatattttaggtcttgcatgccctatctggtttcttcttctctttctccttcttctccttgtgccaccttttaaaatataaaaaccattcttggctcataggccatacatatacagtacacaggccatatttgatccatagaccatggtttgctgaccctgggatataggaatatggttgatttttgtatattgtctgtatattggatcattcttattggaatacaataatgctgttatttcctcagtcttaaaacacttcccctcttggcctcattttcacaccagtcgatgctccatttctttgccccactatgcagcaaactccttcaaagagtgacccacatgtgggtgtcaaatgtctcctctcccactccaaacaggctttgagaatcctctcaggggagtgagggtttataaatgagacataaacccacaggactctgctacatctgtgtatgtaattctcaaaacacactcaggcctggtcttgttactggctgctatgagacctccatcttctcctgagtgagtgtgaaggaggcactctctgctggacggtttggggacaactggccctatagagtctttattagtttcattgtatgtatgtgagagagcaagagaagacagagtgtgtgggtatgtgactctatgtgtttgtgtgactgtgtgcagtgtcgtaacagcacatgtgtgtgcgtgcatacaggcgcatatgtgaggcattctgactggtgttaggtggcgtttcattgtggttttgatttgcatttttatatgatcagtgatgttgaatgtcaggacatgttaagatatattggagctatgtcacatgttccggctttatgtcaggagatggtagaaagtgccaagaaagacgaagtatactaggtccctgtagaggcattttgtagtgttgagctatgctcaggttttgcagaacatgttagactattttggagccatgtcaagtcgtactgtagcatgctgtgccatgttaggctgtcattgctgcactgtgctgctatagcctggtctagtctcctctctcctcccacatcctctcttcttcctctctctttggccctcttcctgctatgtggggcttggaggggagaagtgcaaacctctagctgggagccttcccccaaccccaaagtccctcctttacccacctccatggcccctgattgtccccattcatgtcagccaccattgcaccaaaggacaaggtcttctacagcttcctgaagccctggctgggggagtatctgcaggtgaacagggttgggaaataagttgggggaccaggggaggaagatgaccttgcccatggcccttggctgccctgctaagggatgggttcctgctgagtgctggtgacaagtggagctgccaccgtgggatgctgatgcctgccttccatttcaacatcctgaagccctatatgaagattttcgatgagagtgtgaacatcatgcacgtgagttatttgaagctaaggtcctagctgcagacttggggtggagggaccacagacagatctggtgtagaattttggctctgctgggtggcattgggccattgttcttcctctctgatccctagttttgttttgtttttttttaatctgtaaaatgggtataataatccctacttaaaaggtggtcaaggtgatgtaatggagtcatgtccctggtgcatagtaggtgcccagaaggtgtctgtttctatgattctgtcacccaagccctataaaatcaagagggtcatgacgacaattgcacagtagctgttgctgataagaaaccacttgaaaactcattggtttaaaacaataaaggtttatgaatgttaataagtctatgggacagttggcaggtccttctctatgtggaagggatcagtcatggtacatgagcaacctggagtcaggtaggcagccttgcaggtgttggctgagttctctcaatgtttgggttttggctggcttcagactgatacagatggcctcagctgggacccctggatgttcctccatgtgattctctccttccagaaggcaccccgtggttcacaatgcaggcaggcaggtttccacggagtggcacgaggcttagcttcattagttattacctcatcattttcaccacattgcatttcatcattgaaagccataatcccagcacacaatcagaaaaggagaggaggagtaaaataggctctgtctcttaaggaaagtcgctaaaaaatcacattgcaaagcgtgtggatatgggggtaagtgaagaattggggcgagggttttgtgaagtctccaggttttattaaacttgcaaattgataagttagcttgttactatttcatggattctgccagaagacaggagactcctgggtcagaggcaaagggtggtttattactcatggcacagcaaggagtatgtgtttcctgtcagattgcattgtttctccaggatacccaaatcccttcgggtgacattgttgggcttttataaatgcctgctcaggtagtatgttgcattacagggaaggagcattaggcttagggaatagcaagcaaagtaagcctgatacgggtccaaagggagtcattaccttattcttgaacactgttctctgcacacacaactctcagaaatggctgaagttaagaactcagtgttttgcatttttagcatacccaaaagggatactcagggctcatggaggacttcctgtcccaacatagagatatttttgtaatcaatttataacaaggcagataaggaaagccaacatttattgaaccctcactatatgccataaacaatgccatgtgcccatcccatggtatgagtgtatattgactgatttgatgttcactgttctttgaaggagatatttttgcctcactgtagaggatgaagctgtgggtctgagagattagggagcttgcccaagttcacccagctaataagtgagcttggagtagtgaaacagggtttctaaccttgtttatgtggcaccaaggcaatcatctcaactgttcctcaagatttgacaggtagaacatagggaaggataaggagttcgttcaccaaggacattcagagctggaacttgaacccaggtctcctgactcccagtcttgcatctccatctcttaatattaacaacttttactctcactgcaatttggttacccctggggagggattcttggggagaaaatgaagaggctggaatagtgtgccttggtggttgggtttgggaggggctcaaggaagccagggacaagcaccagctctgtccccatctctggctaggccaagtggcacctcttgaccttggagcacaatgcctgtctcgacatgtttgagcacatgaacctcatgaccttggatagtctgcagaaatgtgtcttcagctttgacagccaatgtcaggagtgagtctttgcccagtggctgggaatttgagccatggacccaaaggagtaggctgggggagagagaactgatgagggcaagcagaagtgcctacctggaggagttgtgtcacagtctttgaatgactggtataaacattatcatgaggtttccagggagatattgaaggggtttgagctaatgggcatggtcagagctgagttctgtgagggactgactgtagtgtggacactaaatggagttgacattggatgcagggaggctagggtagggtagagacagttggaagaggatgaggtctgatctttgtgaacagtttcaggaaggagaaggggcaggattatataccgggggcaggggagagagaataaatgcatgatgttcaagttatgctctgggtgcctaggggcatgaaggcatctcacagagatgggatgcagggagataagggcttggagaatcaatctcatagctgaccccctctctgtatgtgtggggtcatctgtttctgtatactctgtttcctgataggaggtagctcctagctgctgatgggaggtgcttctggggcttcagacatgttaagttgttgcctccctttctgcccttatccttcaggaagcccagtgaatatattgcctctgtcttggagctcagttcccttgtggcaaaaagaaaccagcagatcctcctgcacatggacttcctgtattatctcacccatgatgggcggcacttccacagggcctgccgcctggggcatgactttgcagacgctgccatccaggagaaacgccacaccctccctagccagggtgttgatgacttcctccaagccaaagccaagtccaagaccttggacttcattgatgtgctcctgattagcaaagtgggcttctctgagatttgaattcaagaagcagaagggagcttaatgtcaaatatcagatcaaagaacttagacttgatccagagggcactggggagtcatggcaggtgcttgaggaagggagagacaggtcagagataggttttagagatgactttgctgaatgcacctagcaggggactgctagatgtgaaactgacaagtataagattttactctatttatgcattaataagctagtctatataagtattaatatatctatatctatatctatatctatatctatatctatatctaatgtctaggtcattgtccatgcctgaatttgtgtctgtgtccatgactatgtctgtgtctttgtctttgtcattgcgagtgtctgtctttgtatctgcttctttttctttcgttgtgtctatatctatgtctttgtgtcttttctatgtctgtgtctgtcttttctttgtctatatctttgtcaatgtctatgtttatgtctttgtgtatgtctgtttatatctttatgtatgtcttcatctcagtctttatgtctatgtttagtgtcttttctgtgtcaatgtctatatctagatctatgtgtctttgttcatgtcatatctgtgtatctatgtctttgtctttttctgtgcctgtgtctttgtctatgtctatgtatatttctgtgtctctttgtctatgtgtatgtgtatgtgtatgtgtatgtctatgtctgtgtctatctctttctctttgtcgatgtctgtctatgtatttatctacatctttgtcaatgtctgtctttgtctatgtctgtgcctatgtctatgtcatgtttatgcctttgtatatgctcatgtctatatctttctctatgtctgtgtctgtctttgtctaattcttggtctttgtcaatgtctacatctttgtctatgtctgtgtctttgtctgtttcttttctttttctctttctttcttttttttttttttttgagaaagattcttgctctgttgccaggctggagtgcatgcaatggcatgatctcggctcactgcaacccctgcctcctgggttcaagtgattctgcttcagcctcctgagtagctgggactacgagtgcccgccaccacgcccagctaatttttgtatttttagtagagatgggatttcaccatgttggccagggtgcgctagatcttctgaccttgtgatctgcctgccttgacctcccaaagtgcagggattacaggagtgagccacggtgcccagcgtctttgtctgtttctatttatgtctacatctacatctttccctacgtttatgactttgcctatgtctatacctttgtctatgtctatatctttgtctatatttgtgtctgtgtctatgtctatatctatgtctttctctatgtttatgtctatgtctttttctgtccatgactttttctattgtgacagatgtctattgtaacaagtgcattgaacacctggatcacagcagcccatttattgctcacagtgacactagcagccggagtaggattgtagcattggctttcattcccaaatcacatttctccaagagcaatgcaatgtttttatctgtatgtggaacagtgtttgcgccctaggagaggggctccacattacgagtcttggcacattttctatttattttctcgacagagagagagagagagagagagagagagcgagagcaagagagagtgctttattctgaagcataaaccaattctctccagtgagatgtaatagtctgtagacttacaacacaaatgtcttcaggggaaataaataagattgtctgcatttaccacactggaatgtgagtatacatctttggagcaatacttaatctctaacttccaaggcgaattgttatttaattatcctgtaagctcatttgccagtaactttttctcagaaagttctcaacatgtagaaacatgaaaatattcatgtgtcgttgattcttcccaccagggacaaaagaagaaggaaggaagccagtgaggaagattgcatggtgtgggctctggtgatggtgaccaagagacatctaggagtgcaagctgggcttgggtttctggaaagaggatggatcttcagagtttatttcatgttagactgaggagtcctcagagcttgtgtggttttcaagggtgtttttccttctctccaggatgaagatgggaaggagttgtctgatgaggacataagagtgtaggctgacaccttcatgtttgagggagaggatcccagtgaggaccaagatgtctcatcccagggacgtggtgggtggaccctggatggcttcacccttcccatcccccttcccccatcctctctgaggccctcaatccatgggtgctgtccaccctgttgtgctgaagcagcccagagacccaagactgcctggctgcccctcaggctatgacaccaggaccagtggtctctcctgggtccagtacaaccttgcaatgcacccagaatgccaggagcgctgcgggcaggaaaggcaagagtttctgaaggtctgggagcctaaagagattgaatggtgagtgcaggtgctggtggctgttcctgagctccatgactcatgttggcaatgccgatggctctgctccccaggtggggatgggaggaggagttgtttttgtctattctgctactattgcttagtgggagtaggagtagaggatgacaggcaaggcttaatacccagtctggctatcaggggagaagttgcaggctgtttggacagcaaagatctgctctgctgagagaattggtgacaacatgtgaggggagatgatgccacttaacacatgtttagtagatgaacttcccctttactcccttctttttatccctgaaatgtcattttgcatgcataatctgttttcgttattgcaacaaccttgtgaggtgctgctgctgaaacgcccatttacggacgtgaaggagcacagcctggtggtgaggggggcacaatgtgaggctgggtgggtggtctgggtgcacagcccagatccaccagctctatgactgtgggtagtcactcaaatattttccagactggatttctcatttgtaaaatggaaaaacaaaatggttaatatagttaaaagacttaaaacaggctccatgactcatgttggcaatgtcgatggccgccattcctgctctaacctgcttgcccatcccaggcacacaggaggtctgcagtgagctgagcccctctagccactgggggcactttcttctgtgtccctaggaccctgcctgttcatcaacccctggctttgctccctgagcctaagaaggatggaaccaccagcaggtgaggtctgtccttgcagaggtagtggggattttgggggatgcaccctacgcgaatgaagctgtaggaccaggtgcctgaatcccctggctgattgagctggcaggggtggtggggtgggggtggtctaggggctccccagtacccagccagtgtcaggagtactgtcttccccaccctcctgctcagcagttctgctaggagccccctccttcaagcgcccccctcacctgagtccaccccacaggacaattcaggacaggatctagggagggccaggaggggagccctggatctgttgggaggagaatcctgcatgtgggagaaggagccaggtgctgatccaagggcctcaagatatttcccctttggggctatcacactgcctgagattactccattataaatgtccctatattaatatggcattgacactaaagaatgggggtggagcagcatggcagagggaacggatttggacttgagggtctcatagtcttgagttcctatgagctctgcaacttggactagaggcctgccctctctgagcctcagtttgcttttgtgttaaatggacaccttctctcctctggatgccatcactcaggtctcttcaacaatgcccagggttctggcctagggagctgttgggagggtggtgggacagctttgggcactgtgatgcaggtgagcatctgatacaagcaggtgcacgttatatagagcacctggcacatagtaggtgcaccttatgtagagcacctggcacacagtaggtgtactttatgtggcgtacctagcacatagtaggtacactttatgcggcatacctggcacacagtaggtgctctttatgtagcatatctggcacacaataaggcacactttatatagtgtacctggcacacagtatgtgtgctttatgtcaagtatgttgcaccgagtagttttactttatgtaggggacctaacacacgggagaagcattttatgtggaacatctggcacacagtaggtgtgctttatttagagcacctggcacacagcaagcatggtttatataaagggccagggactcaagatacaggatttgtgaagggctcccagcatacagtagacagtatttatgtggagctcctggcacacagtaggtgcactatatgtagaatagccagcacacagtagacaagatttatgtagattacttgatgcagagtaggtgcgctttctgtgggtcaccaggtacgtagtacacatgctcaatgtggagcacctgacacacagtaggtatgctttatatacagcacatggcacagagtaggcacgctttatatgaagtactctgcataaagtaagcttacattatgtacagcatgctgcacacagtaggtgagctttatgtggcatacctggcacatagtagacagaatttatgtacagtatctgatacacagtaagtgcactttatatagtgaaactggcacacagtaggtgcacacagtagtgctttccgtacagtctttcgcatggagtagagacaggcacacagcagctcaagtgctagttgtcatccccttcccttcagtccctctttttggagctcccttttcttaggagccttcctccgtcgccctctaaggcctcatctgacatcccatttcccagatgggaagcctgagcccaggatggccacactgcccacagtcagagaaaggacagggcagaacaaggactccactcgggatccccttgctctgccctcccctgcctggaccccgtcagctcaaggcccctctcagcctcatcccctgtgcctccgctctgtcctcctaagctgagcccagcttctaggtttgctcctccagctgggctctttatccccagaatctgacgaaggtaatcctcagcggggttggggctggattctttcttcctgcttcaagcagtcaggcctcaactcaggccctgggctgccaggaggcaggacttgaactcttgccaggctgtgaagccagagatgagaggcttctgtctctgaatctcctaagtctgcaccaagatgtagtgcctgacatcctccccgcccatgtttggagaggagcccagatgatctgggacaagggttggcctggcccagctcagctggctgccaactgtcatgataagtatatgcttttatctgaacacccttgtcttggaagggcagggtggaggtaaacttggggttcagagtcccctctaaccaccctccaacttcccctgcaaactcccaagaaggtactgagacctgagaattcagtgctcgtgctggggcaccctgagctgcacccagtgggcccaaccccaggttttggctggctgcccaggcacggaagacacacccaggctgtggggattggctgcctcagcccagcccagcccagccccgcctcctacggccttccctagatcaggggccagggccaaagacctcccagcagaagaggagaagaggttgtgtgggacaagctgctcccgacagaaggtaccaggctgggggtggcagggctggaaggtcctggcctgggatgaagaggggactgcctaaggctggggtggctccaagatgctggcatgggaaactgggggtttcctggtaactggactcctagcaaactcccaaggattcaggtggggcccttctggactctaatcggcccatctctttccctttctgtgtggttaccaggttactggaggccacttagttgttggttttggttgggactttctggacttcagatctcagccctcgtttactcacccctgagccctccctgccctgcccccagcagttcctgacttcgcccctatacactgtccccggagctcttccctgggcctcaggtcctcaccctgcatcccctctgccctgcaggatgtcgctgctgagcctgccctggctgggcctcagaccggtggcaacgtccccatggctactcctgctgctggttgtgggctcctggctactcgcccgcatcctggcttggacctatgccttctataacaactgccgccggctccagtgtttcccacagcccccaaaacggaactggttttggggtcacctgggcctggtgagtgtgacagcaaaatgtgtctggggtctcagggtggatggacttccagaggagcaggaatggggctcagtgagctaggtattgatggtggctggggtctgcgaccccagagaagcaagagagatggctcactcattcctctgctaactcactcattcctctacccactcactcctctacccactcactcactcctctacccactcactcactcctctacccactcactcattcctctacccactcactcattcctctacccactcactcctctacccactcactcactcctctacccactcactcactcctctcctcactcactcattcctctcctcactcactcattcctctacccactcactcactcctttcctcactcactcactcctctcctcactcactcattcctctcctcactcactcattcctctcctcactcactcattcctctacccactcactcactcctctacccactcactcaatcctctacccactcactcactcctctacccactcacacattgccctcctcactcactcattcctctcctcactcactcattcccctcctcactcattcctctcctcactcactcattcctctacccactcactcattcctctcctcactcactcattcctctacccactcactcattcctctcctcactcactcattcctctcctcactcgcgcattcctctcattcgcgcattcctctcattcactcattcctctcctcactcactcattcctctcctcactcttattcgtctgctcactcactcattcctctgctcactcattcctctcctcattcactccttcccctcatcactcactcattcctctgcccactcactcattcctctacccattcacttattcctctatccactcactttttgctctccccactcactcattcctctcctcactcactcattcctctcctcattcactgattcctctacccaccgactcattcctttcctcattcattcattcctctgcagttccatgccaaacctttctcacctccctgtcctcccacctcagcctgcttggatccttttcctgcctgtcttccctaccgtagtgcccctcccagaggctcctgtatggttgtggggtgcacagagcagggctctcctggcattcccaccttctccactgctggacttgaagccttctgagccccgatagacaggctgctccctgcatggcccatttgcttgtatctgcccatctctgggctgctgctttcccgcaggaattatctctgacttccttccccacggagggacacagctggaccagaagagaagtgcaggcagtctcccacaccctctccttccagggacaatgtgctcttccccagtaagatgtcccagtgagccctgtagcccaacctggatataatttggccactcccttcccctttcagaagccgtccttggtactcccaaacctttccctccgactgggaccggccctcccctttgggggatgtggcctctgtctgctcacttacaaaaggcaggattgatcggtgtgtccacaggtgcacaggaggcactagcacagaacctggcataagtgaggctctcctaggtgggagctgccatcctgatggacattagagtcacctctgctcccctggaggctgctgagaatggagggccctcaggacgcaggccctttgtctgtgggaggaaccagtgcccatgtggaccaaccaggacacaaaaggatatggcaaccagctctagggatatgtcctgaggccacactgctgcccacaaacctccttccatggggaccttcccatatagcaatccccagattgaaatcaatccaggatgagaaaacacatcctcttgagcagacagcttgtcttctctctctgctttggtatttacccttggatcttggggacagctccaagagagaaggagcagaagtcagcagaaacccactgcagctgctgagaatccagacacgctgctcactgcagaggctgcaccacatccggtggctgtggggggacttgctgtggcttcatctagggaggtgcattagtcagggttctccctagaaacggaatctccttagaaacagatagggtgtttcttcttatctctaatgcatgtatgtatggagacagaaagagatagagagataagaatttattatgggaattggataatgtgatgatggaggccaagaagtcccatgatatatcatctgcaagccagaaaccagggacactggtggtgtaaattcagcctgagtccagaaaggcctgagtccctggagttctgagggcaggagaagacggatatcccagcagcagaagagagagcaagttcttcctttcctctgccttttgtcctgttcatgccctcaatggattggatggggtctggcgtctcagggtgggtggacttccagaggggtgggacttccagtaggggttcagggagctgtgtattgatggtggctggggtctgggaacccagagaaccaagggagacggctcactcattcctctcctcacttactcattcctgtgcccattcactcattcctctcctcactcactcattctaataccaactcactcattcctctcctcactcactcattcctctcctcactcactcattcctgtgcccattcactcattcctctcctcactcactcattcctctcctcattcagtcattcctgtcctcactcactcattccttttctcactcattcattcctctcctcacccactcattcctctgcccactcactcattcatatcctcactcactcattcctctacccacactcattcctctcctcactaattccaataccaactcactcattcctctcctcacttactcattcctctatccattcactcattcctctcctcactcactcattcctctgctcacttagtcattcctctcctcactcaactcattcctcactcactcattcctctcctcactcactcattcccctcctcactcactcatttctctcctcactcattcattcctttacccactcactcattcctctacccactcactcattcctctcctcactcattcccttcctcccattcctttacccactcactcattcctctcctcactcactcattcctctcctcacttactcattcctctccccactcactcattcctctcctcactcactcattcctgtgcccattcactcattcctctcctcactcactcattccaataccaactcactcattcctctcctcactcactcattcctcccctcattcagtcattcctgtcctcactcactcattcctctcctcactcactcattcctctgctcactcactcattcatatcctcactcactcattcctctacccacactcattcctctcctcactaattccaataccaactcactcattcctctcctcacttactcattcctctacccattcactcattcctctcctcactcactcattcctctgctcacttagtcattcctctcctcactcaactcattcctctgctcacttagtcattcctctcctcactcaactcattcctcactcactcattcctgtcctcactcactcattcctctgctcactctctcattcccctcctcactcactcatttctctcctcactcattcattcctttacccactcactcattcctctacccactcactcattcctctcctcactcattcccctcctcccattcctttacccactcactcattcctctcctcactcgctcattcctctcctcactcactcgttcctctcctcactcgctcattcctctcctcactcactcgttcctctcctcactcactcattcctctcctcacttactcattcctctcctcactcactcattcctctcctcactcactcattcctctcctccctcacttattcctctacccacacactcattcctctcctcactcactcattcctctacccatgcactcattcttctcctcactcattccttcctctcctcactcactcattcttctgctcgctcactcactcattcctctgctcactcttattcttctcctcactcattcctctcctcactcactcattcctctcctcactcactcattcctctacccatgcactcattcctctccttactcactcattcctctcctcactcactcattcctctcctcactcactcattcctctcctcactcactcattcctctcctcactcactccttcctctccacactcactcattcctctcctcactcactcattcctttcctcactcactcattcctctgcactactatttccatcctgtttaccttcaaatgctaatctcttctcaaacaccctcacagacacacacagcaataatgtttgactggctatctgggcatcccttagcccagtctagtggacacctaaaattaaccatcacaggaagtgacagcccttgacttgctttcagatcactcctacagaggagggcttgaagaactcgacccagatgtcggccacctattcccagggctttacggtatggctgggtcccatcatccccttcatcgttttatgccaccctgacaccatccggtctatcaccaatgcctcaggtacccatgcagagcttgtggtggtgggtgccagaccaagcttctgtgtggtctctgcagtacccacgtccctccttgagtactcgtgcccctcattgagacttccttctcaatgtcttctccctccattgccatctgctccctgtcttggtgttctgggcaccactggggctccaagaggcctcaattcagggccctttctggaaggaacccccatgcttaaggacacgggtctagacagagacatttccagcctcatagggtcaggaatgggcaagagagagatgggtatgacaacacagagaactgggtgtctgctggggcaggctggaatgtttcctggaggaagagttgttggagctatgtctagaccaataagtaggattttttaagtgtggggcaggatgatgcagtgggcatcattggtatttggggtcccagccagtccttgcaccagccttgcccatccctcagtccaaagcggtaggaggatttgtggctggtggagaatctgggctgctatttatgtgacatccacctatgatgggtcagttccttctacctcatcctatcactcatccaccctaagtttcctgctctcctcctatgggcttcaggattctccaataggagaacccacaccagctgcttgacctccccttgctctctgctcttctcatccttggacacaccaggctgagctagggaagtggcagcatcccacaaaatctatggctctgacccccaaatccttagtgactctgtgcaggtcaccagctctctggctgctgaggtctctttcagttgtgagtgatggaaactcaacttcgtgtgctctaagcaaataaagagagtcaaaggagtgtaaatttcagggagggtggtcttcaggcatggctgaatccaggtgtcaatgaacattatcagggatctgtctccttttcttaatttcaccatttctctgcatcactttttcttttaaggcagccgttctcttatctgtcaaccatgggtcctagcagctcagttcttgtccgaaagctcaccttacccccaggggtcccataaatagccgcctatagtttcaatattatacctggttatatcttttctgtttaacctgggatcatatggagaagtcatcatgtgtgtggctcagctgtggtcgaggacacttggggcatgtcagagactttctggttcttctctgacatgtgatttgaaattgtcttttctcctccttgtcatctcttggccatgtttgtagcttgtccaaggtctgggagctagggtctctttggaattgtcagagttattattttagtctccctgagccaggtttcggaatccattctaatcacgcttgaagaaaactcttggttccacctgggacatgtctgggacatttaagaaatcacatttaaaccctatctggggcctgtctgtggggtacacagaggtcatgtcagactatctcaggtccatgtcaggagatgacagagagtgctatggcagacagggtgtccgaggtcctttaaaggtattttgtagagtgtggagctgtgttcagttgttgcagaacatgttgggatatataggagccatgtcaaggcgtgctggggtgtgctatgacctgttaggttgtgtcatagctttactgtgctgttgcagcctgggctggtccttcttcctctatcctcccttcgtcctttgcccttggcccccttcctgctatgctgggcatggagtggggaaagtgctggtaggcagccttgccctatacctgaagttcctctcttgccctctacatggcccctgatggtcctcgttcatgtcagctgccattgcacccaaggataatctcttcatcaggttcctgaagccctggctgggtgagtacctgcaggtgaaaggggttggggacaaccttgcggggagggtaggggaagtgctgctcttgcccactgtccttggctgccctactaggagaagggatactgctgagtggcggtgacaagtggagccgccaccgtcggatgctgacgcccgccttccatttcaacatcctgaagtcctatataacgatcttcaacaagagtgcaaacatcatgcttgtgagtcccttgaagtctgggtcccagatggagtcttggggtggagggaccatggacacatctggtctggaattttggctcttctgggtggcactgggccattgctcttcctctctgagccttggtttcctcatctgtaaaatggggatgataatccctacttgaaaggtcatttacttggcacacagtaggttctcagaaggtgtcagtttctgtgtttttctcacagaatccctgtaaactcaagagagtaaaaatgaagattgtgtagtagtcattgctgattataaaccacttcagaactcattggcttagagccataagggtttacaattgctaacgagtctgtgagacagctggccagttcttctggatgtggaagggatcactcttggcacatgagcagctgtgggtcggggggcagctttgctgatcctggctcagttcattcacgtttggggcttcagtaccttcagactcatctgggatgggctcagctgtgacacctggactttcccccatgtgattctctgcctccagaaggcaccctgttgttcacatggcagagactgggctccgagaaactgagaggaggctgcaatgtctgtggacattgtctctgcaatacttcaaagttcaaccaggtttgagtctattagagttattacatcatcatttcaccacattgtactggccaaagaaagtcgaaagtcaaaagtccagtacagactcaaaggggtgtaaaatagaacgcatctcttaatgggagttgctgaaaaattactgtggaaagggtacgaatacagggagaagtgaagaattgggggtcaggattttgtgaagtgtctaggatttgttttaaatatgcaaactgataagttagcttgttactgtctcatgcattctaacagattcctgggtcagagacaaagggtagttgattactcatggcacaataagcaacatgtacttcttgttggtttgtatcctttttctgagtcaacctaaattccatgggggtgacactggtgggcctctacattagcctgctcatgcagtacattgcatgacatacaatgggcattaggcttagggaatctactttaatagtggcagaaacaagcctgatattggtccaggaggagtcattgccttatctctccaggtggttatctgcaaatacaactctgagaaatggctcaggtaagaacatcacagtcttgcattggtggcatacgcagcaaggatgctcagggctgatgaagaagtgcctcttccaacacagggatatttttgaaatgaatttattacaatggagatgaataaagcaaacatttactcatcatatgcctgagaaaatgtcatgtcccaatgccaggatataagttgtctaagttaattttaataatcctgtgaggttatggttatttttgtcctattgcagatgatgaactgagggccagagagattagggagctggacagagttcaaccagccaggaagtgagctaggactggtggagcagagattctatcctggtttatctggccccaaagcagatcaccttgaccgttattgaatatttgacaggtgggacctagaggagggcaatatgttgaccaagggcacatagagcataggagacagagctgagacttgaatgcaggtctcttgactccaagccatgggtcttcatctcctatactaacagtttctgctcgcatcccagtctggtcctcgctggcaatgggttcctggggcagaggaccaggaggctggttgtgggggagtccatcctgatgtttgggactggggaggggcacaaaggaggcagggcccagctctagctctcttcccttctctggccaggacaagtggcagcacctggcctcagagggcagcagtcgtctggacatgtttgagcacatcagcctcatgaccttggacagtctacagaaatgcatcttcagctttgacagccattgtcaggagtgagttccttcctagggcctgggatatgaatccatggaccaaagggagaaagttggggagggaggaatgagcaaagtaaccagaagtacctttcgggaggatttgtatcatagctgtgctttgaaggtcgaggaagaggagaaagtgctgtctttccaggtagaaatatgtgtgtaaaagcaagaaggttaggatgagccaagcatgtgcaagagacagtagaaatgaggttgtggaagtaggggctagatattaagggcactgaaaatcaggaaaagtggtatgaagtttatcaagacatttccagagaccttttgtagtttcagctgatgatggatgtgataagagctgagctgtgtgggaaactgatagcccaccaccacgcccagctaatttctgtattttcagtagagagggggttcaccatgttgtccaggctggtctcaaattcctgacctcaggtgatgtgccctctttggcctcagaaaatgttgggattacaggcatgagccactgtgcccagctgcttcttctttcttacagggtgaaagagagagggagagagagagagacagagagacagagagagagagagagaaagagagagagagttggttatgctgggggctggagcagggctgaactggaagaggatgaagtctgagttgtgtggacagttttggtaaggaaaatgatcagtactgcatactggatgggagacagaggagagaagcatggtgtccaagctatactctaggtgcctaggtgcatggagacagctctctcagagataggatgcagggagagaagacagtctagagagtcagtctcatgactgatacccaccatgtatctctaggaccatctatttctagatactcagtttcctgatgggaggtagctcctggctgctggtgggaggtgttcctggggctttgcatacgttacattgttgcctccctttctgcccttgctctgcaggaggcccagtgaatatattgccaccatcttggagctcagtgcccttgtagagaaaagaagccagcatatcctccagcacatggactttctgtattacctctcccatgacgggcggcgcttccacagggcctgccgcctggtgcatgacttcacagacgctgtcatccgggagcggcgtcgcaccctccccactcagggtattgatgattttttcaaagacaaagccaagtccaagactttggatttcattgatgtgcttctgctgagcaaggtaggtttctctatgatctgaatttaggtgagagaatagagcttcatgtcaaatgtcaggtgaaataaattggttttgatccaaagggcactgggagccatggaagatgcttgagaaagggaaggtcacagataggttttagagatgactttattgcatgcagcccacagggcactgctaattctgaaactgtgaggagcatgatattttattcaacttataagttagtgtgttagtctttcacatttttatgtgtatctatatgtctatgtctttgtctatgtctgtatctatgataaaagatgcaccaaacccctggatcacagcagcccattaattatttacagcagtaacagcaggtggagtaggatggtagtgctggctccccattcctagggcaacacaatgtttttacctgtaaatgcacaagaatttgcaccaaggagaggggcccccacattatgagtattatagcttatataggacagctagctcatatgctccttctttattacagggtgaaagttagagacagagaaagagagagagagagaatgctttgttctggcgtataaactacccctctcctgtgagatggcaatttctagagttttataacccaaatatcttctggaaagataagattctctgggtttaccactctagaatgtcagcaaatatttttggagcaatacataatttctaacctccaaggcaaattgccattcaaatatcctgtaccccaggttgccagtatctttttctctgaaagtctgtattatgcagaaaaatgaaaatattcgagaaccattgattcctgtcaccagggtccaaagaggaggcaaaggatctgggggaagcccttggagttggggctttggtgatggtgaacaagagagatctagacgtgcagagtgcatttgagtttctggaagatcagagcttcagagattatctcaggttagactccggagtctcagagatagtataatttgtgtgtgtgtgtgtgtgtgtgtgtgtgtgtgtgtgtgtgtgtcttgctttctcttcaggatgaagatgggaaggcattgtcagatgaggatataagagcagaggctgacaccttcatgtttggaggtgagggtcccagtgtgggactacagtggagacagaggtccctccatctcaggatccgggtgggtggaccctggatcactccattctgcccatcttccccctccctccatcctcctgagggcctcaatatctgggcgctgtccaccctccggtgctgaagccaagcttacctggctgctcctcaggccatgacaccacggccagtggcctctcctgggtcctgtacaaccttgcgaggcacccagaataccaggagcgctgccgacaggaggtgcaagagcttctgaaggaccgcgatcctaaagagattgaatggtgagtgcaagttcttctggcctgttcctgagcccatcattggttctgctccccaagtgaggaggggtggaggagttgttttgtggattcttccactattgcttagtgggtataaaagcagaggaccacaggcagggcttgataccaagcctggctgtcaggggaaaagttgcaggcctttaggaccgaaagacccgggctgctaagagaattggtgacaatgtgtgaggacagataatgctactttgcacatgttcagcaaatgaacttcccctccactctgtttctgttctcccagaaatatcagttttttcgaaaatcctcacttcttgaatgtttgctcaggtggggagggagaagttgtttttgtcaattcttccattattgcttagtagtactaggagcagagcacagaggcagaacttggtatccaacctggctagcaggggaaagttttcagacttttgggacagagagtcctagcccgctgagagaactaaggacaatatatgaaggcagacgatgacatctagacatgttcagtcaatgaattttcccttcactcctttcttgtttactctgaattatcatatttttttcaaacatctttacttcctgaatgtttactcttctgttccctaattcctaccctccggtccagtccagggagtcctaagggagacctgggggtaaaagtcatctatcttttgtctagaacacctgcatcgttcatccattcagtcttcattcagcaaactcttccacatgcctttccattgccagttctgttcccacacctttctgtgctctggagacctggaaagaaccctgcctatggatgtgttttccaggtactcccagcctagtaggaacagtcccccacaagacattcccagtccacataggcaaggatggagttgagagcaagagaagcatggctgggagtacagaaagtgtgatagaaagtgtttcaagccagatctggtggctgtcgcttgtgataccaagtaccgaggaggctgaagtgggataatcacttgaggtcaggtttaagatcaacctgggcaatatagaaagaacccatttctaaaaaagtaaaaaaccaaaataataaagtgcctcaactgaaaccctgaatggtgatcagtaggtgtttggatgcagtagtgccctaggtcaaaaagaaagtctgggcaaaaatgcaaaaagagggagcaggagagagggagaagagggaaagagaggtttgtgtgtcagggaaggagatggttataaagggagggagaagtaagagggaggaaaagtgagggagagcaagataaagagaggagggaagacagaaggagacagagagagaatgagagagaaaggaactgagttgtgatgagataataactatggtagtgaaagcagagtctggctgtggaaaatatgggaaaatggtaatggcttccattttaacccaaaggcaatgggaagccataacaagtggttgagcaggggaggggcaggtcatatctgggcaccagaaagatcttttcagagctactgtggagagaggaccagctgtagaatgaagtcccagtgaagacattctgggacctgagccagggcaggggctggggatggagaggaggcaatggactggacatgtgttttggaggccgtgtcctcccgtccaagcctttgctcagcacagcagtcctaaaaggtggcaacactttttatgcttttaaaaaccaagatatcaagtaatactgtgcactttgtaaacaaaaaaaagtgtctaaaacatttataaaaatgagctttcctcatgcctgtaatcccagcactttggaaggccgaggcgggcggatcacgaggtcaggagatcgagaccatcctggctaacacggtgaaaccccgtctctactaaaagtataaaaaattagccgggcgtgatggcaggtgcctgtagtcccagctactctggaggctgaggcaggagaatggcgtgaacccgggtggcggagcttgcagtgagctgagatggcaccattgcactccagcctgggcaacagagtgagactctttctcaaaaaaaaaaaaaaaagagcttccttcttaactgtcaccctagtagtttctaccatcaatggttttgtgtgtccctccagaagatggctatcttgatgcccactttataagaacacagacttcttctatacaaataagagtgtataaaatagacacagtactttttcccaagatggtgggttggaggcaatgtcagtgtgcctctcccatgtggaaggacagaatagtgtgtagagattcacagtgtaagctttcttttcccaagaaacaacacagggacttaacaggaaaaccagaagaatccacaaacccttcaaaagaagctacaggctgcattctactctgtgagacaggtgaaaaactgtgaatcctcagagtaagagggggagagactgcttcctaggtacacatcttcactggggaatctgaaaatccagaccacaggagaaggccttaactctatccagggcttgaactgatttagggagtggtaagaaatataaaagtagaagcagcagcaggaagtcccttgcaggcattcacaatctccagcatggactgagggaagccattccttattgtatctcacaggggaccttggggaagtcagacaactagctcaggtgaggtcacaggttgaacgaaatgcccaaatgaatttcttgatataacctcgagtggggatgaactcccttgaccagaacccgggaggcaagcaggaagtgtgctgcagacaggagttcagaagctgggtgcctggccttggacagggacaaaaaaggacatggcctgaaagcattgctatttctgtgggaaaagcttatggcctggggcagggctgagttctgtgcacagactgcctggatctaaatccagtgctatgagtggaacactgcatgtgtgagacccaccttgtgccaactgcatgggagctagatgaggcttactgccacctgctactctccactcccttgtcaaactcttctgtgaggcagaggcagttatactcacctctggatcattaccccagtgacctaagaaccaccctctgactctcacagggcaaaacaaacaaacaaaaaaacagttgcaaaaaaaaaaaaatacctaggaatatacttaaccaaggaggttaaagctctctacaaggagaactacaaaacagtgctggacaaaaccatagatgacacaaaccaatgaaaacacatcccatgttcatggattggaagaatcaatattgtgaaaatgatcatagtgcaaagcaatctacagatttaacgcaatgcctatgaaaataccttcatcatttttcacacaactgggaaaagcaattctaaaattcatatggaaccaaaacagagcctgtgtagtcaaagcaataccaagcaaaaagaaaaaatttggaggcatcacattaccggacttcaaattacattacaaggctacaattaccaaaacagcatggtactggtataaaagtaggcatttagatgaatggaacagaaaggaggacccagaaataaagccaaatacttacagccaactgatctttgacaaagcatacaaaaacataaattggggaaagacaccctattcaataaatggtgctgggaaaactggacagtcacatgtagaaaaatgaaactgcatccccatctctcaccttgtacaaaaatcaaaggcttaaatctaagacagaaaccataacaattttataagataaccttggaaaaactcttttggacattggcctaggcaaagaattcgtgaccaagaccacaaaagcaaatgcaacaaaaccaaaaataaatcagtggaacttaattaaactaaaaagcttctgcacaacaaaataataataataataatagccgacttaacagacaacctacagagtgggggaaaatatttgcaaactatgcatctgacaaagggctagtatccagaatctacaaggaactcaaacaactcagcaaggaaaaaaaacaaacaaacaattagttccatcaaaaagtgggcaaagggcatgaacagataattctcaaaagaagatacacaaacagccacgaaacatatgaaaaaatgctcaacatcactaatcatcagggatatgcaaattaaaaccacaatgagataccatcttgtttctacaagaatggccataattaaaaagtcaaaaaacaatagatgtatgttgtggatgtattgaaaagtgaatgctcatacactgctatgaaaattaacataacctctgtggaaaacgataaggatattccttagcgaactaaaagtaaatctaccattccatccagcaatctcactactaggtatccacccaaaggaaaagtgattatatgaaaaagacacatgcacatgcatgcttatagtagcacaattcacaattgtaaaggtacggaaccaacctaactgcccattgaccaatgagtggataaagaaaatgtggcatatatacacaatggaatactactcagtcataaaaaggaatgaaataatgtcttttgccgcaacttggatggagctggaggccattattctaagtgaagtaactcaagaatagaaaaccaaataccatatattttcacctataagtgggagctaagctgtgaggacacaaatacatacagagtgatataatgagctttggagactcggagagcaaggttgggagccgggtaagggagaaaagactgcatattggggacagtatacactgcatgggtgatgggtgcactaaaacctcagaattcaccactatagaaatcatccatgtaaccaaaccacttatatcccaaatgctattgaaataaaaggaagtaaagaagagacagatctgcacattaacaatatatctttgggagcttttctttttctaaaaatatgagttttggaaaattagttcgtttttatttttaattggcaaattttaattatatatgtttatggggtgcaatgtgatattatgatatatgtatacaacgtggaatgattaagtcaatttaataaacatacccgtcatctcatatactcatcatttttgtggtgagaatatttgaaatttgctctcttagcaattttgagaaatttattattattaactgtagtcaccatgcatgcaatagatctcaaaacttattccttctaacggaaacttgtaccctttgaccaatgtctttccattctttcttcctcccttctctggtaaccaccattctcttcttggtttctatgatttctgtgttaattatttcagatctcacagttaattaaggttatgtgctgtttgtctctttgtgcctggctcatttcacttagcataatgtcctttaggttcttgcagattgccacaaatgaaagaattttcttctgttttaaggctgactagcattccattttgtatatatacaccacacggaaaatgagttttgaattacaaaagcaatgatgagaacagtttcttcttgcactcaatgaggcatcacagatagacaagggttattcttgacattcctgctatcccacctaatatcctccctttctccaagggggcctgtagagatacttatttgtcatctatctgtctgtctgtttacatctatctacatatctttctatcatcgatctcttcttatattccttatattttttgtcctatggtatttacatatatggacatttgggaacatgtttttttccactcaatactgtgtctgacagatattttttctgagtgctgaatagcattccatgttttatttggcccatccctttgttgaagacacttgcgtaaacatttccaatcattggaggtatggccaatttgcattccagagtctctgtactgatttagcttctggtctgcattgtgtgacaggactagtgatcctttttttctccttttgtgtagctgtatactattccattgtgtggatgtttatctaaacatctccccatccatgtatatttggcttgtttcatccttttgctaaattaaacttgtgcaatcggcatgtgtgtacagtgagcattgctcatatgtataaacatcactgcaggacaaattcccaaaagtgcaattgttgaaccaaagaccatttgcattctacagttgtaataatgattgcaaatccatctctatattaggtgagtttgatggcactagctttcccacaaatttgccaatagtattattgtattattaaatttaaattttttgtccatcttcatatttcatcttttaatgagcattttcttaaataagagtgagaaagaacatcctttgcccaagttgataagccatttattttctttctatgggagtggtcatctgatattttctgctgtttttctttgggttcttttttcttatttacttataagaatgtgtatcacaattaatgttttttttttctgtttttttgttgcaaaagattgccttttgacttttttggggggtgcttttggttaatttttatgaagttacatttgttcgtattttcttttgtaccacactacccagctatttcccagagttttgtggggcttcctttggcagatgggaagtttccacttattcacatgcccgtctctgacctttttagtcttttgaatgcatccgtttttatggcattgccagactattttttcttactgtgacttttcttttcttttttctttttttgagatggagtctagctttgtcgcccaggctggagtgcagtggtgcgatctcagcttactgaaacctcctgcctctctggttcaagctattctcctgcctcagcctcccgagtaactgggactacaggcaccctccaccacgcctggctaattcttgttttaggtagagatgaggtttcaccacattggtcaggctggtctcaaactcttgacctcaagtgatccacccacctcggcctcccaatactctgactttctaatgggttttaatatctggcagagtggctttttttgttgttaaatcaacccctgcaaacatttattgtgtgataaagtgtatgttttatttggattgagggaaatttataatgaaatacagagatttcatgtttctttttaagtttaatccaggtattttatattattatgactagtatcttttcttttattatcttttcatttgatggttatttctatatggtaaaactaatgatttatgcatataaattctatgcccagtgaacatagtatatgctaaagatggtatctgtatcaagagaaaaaatatagataattaagtaaaagctcttggggcaactggaaagccttctggaaaaaaggcaactgaaccttgttctcatatcttatgacaagataatgttcagattaatcatttttttctaaaagagtcctaaaagctctagaaggaaccatgagaaaattatttcatagcgccagagtagggataaccttattttgacgtaagtcccaggggctatgaaaaagtgataaactgttaaatgagagaaaagatacacgccagccacggtggttcatgactgtaatcccagtactttgtgaggccaaggtgggcagatcacttgagatcaggagttcaagaccagccttgccaaattggggaaactccatctctactaaaaataaaaaaaaaaattagctggctgttgtggtgaatgcctgtagtcccagctacttgggaggctgaggcagtagaatcacttgaaccagggaggtggaggttgcagtgagacaagattgtgtcactgcactccagcctgagcaacagagactccattccctccccccatcaaaaaagatacagaatagtgtctacagtagatggtgtgctcctatataattttttaagatgcttaaaatcagcccagaaagcatacattaaaaaaaataataacctggcaacgtgtggggagaagtaaatggcattgggccataggagtgaattatgttttatagttttcaaattctgaaccagataattgtagacggtatgaaaattttaaatagccactgcaaaagaagaaagattaagcagagaattcagctcctttgcttgatcttaaatgtttataaacgttttccagtggggcctctagtgttttctaagtataaaatcactatctgccaaaatgatacatttactaccacatttcaaattgcctgactctcgtgtttttttggctgcataaatgtcttcttttgagaagtgtctgttcatgtccttcgcccactttttgatggagttgtttttttcttgtaaatttgtttgacttcattgtagattctggatattagccctctgtcagatgagtaggttgcgaaaattttctcccattttgtacgttgcctgttcactctgatggtagtttcttttgctgtgcagaagctctttagtttaattagatcccatttgtcaattttggcttttgttgccattgcttttggtgttttagacatgaagtccttgcccatgtctatgtcttgaatggtaatgcctcggttttcttctagggtttttatggttttaggtctaacgtttaagtctttattccatcttgaattaatttttgtataaggtgtaaggaagggatctagtttcagctttctacatatggctagccagttttcccagcaccatttattaaacagggaatcctttccccattgcttgtttttctcaggtttgtcaaagatcagatagttgtagacatgtggcattaactctgagggctctgttctgttccattgatctagatctctgttttggtaccagtaccatgctgttttggttactgtagccttgtagtatagtttgaagtcaagtagcatgatgcctccagctttgttcttttggcttaggattgacttggcgatgcgggctcctttttggtgccatatgaactttaaagtagttttttccaattctgtgaagaaagtcattggtagcttgatggggatggcattgaatctataaattatcttgggcagtatggccattttcatgatattgattcttcctacccatgagcatggaatgttcttccctttctttgcaccctcttttatttcattgagcagtggtttgtagttctccttgaagaggtccttcacgtcccttgtaagttggattcctaggtattttcttctctttgaagcagttgtgaatgggagttcactcatgatttggctctctgtttgtctgttattggtgtataagaatgcttgtgatttttgtccattgattttgtatcctgagactttgctgaagttgcttatcagcttaaggagattttgggctgagacaatggggttttctagatatacaatcatgtcatctgcaaacagggacaatttgacgtcttcttttcctaattgaataacctttatttccttctcctgcctaattgccctggccagaacttccaacactttatgcagccaaaaaacacatgaaaaaatgctcaccatcactggccatcaaagaaatgcaaatcaaaaccacaatgagataccatctcacaccagttagaatggcaatcattaaaaagtcaggaaacaacaggtgctggacaggatgtggagaaataggaacacttttacactgttggtgggactgtaaactagttcaaccatggtggaagtcagtgtggcgattcctcagggatctagaactagaaataccatttgacccagccatcccattactgggtatatacccaaaggactataaatcatgcggctataaagacacatgcacatgtatgtttattgcggcactattcacaacagcaaagacttggaaccaacccaaatgtccaacaatgatagactggattaagaaaatgtggcacatatacaccatggaatactatgcagccataaaaaatgatgagttcatgtcccttgtagggacatggatgaaattggaaatcatcattctcagtaaactatcgcaaagacaaaaaaaccaaacaccgcatgttctcactcataggtgggaattgaacaatgagaacacatggacacaggaaggggaacatcacactctggggactgttgtggggtggggggagggggaagggatagcattaggagatataactaatgctaaatgatgagttaatgggtgcagcacaccagcatggcacatgtatacatatgtaactaacctgcacattgtgcacatgtaccctaaaagtataataataataaaaaaaaaaaaacaaattgcatgactctccttttttcccttgcctaattgcacttgctggtatctctagcatcacgctaaataagagcaaaacattggatctgggtattttgtttgttattcatttgcatttgagtttgctttcttgccatagacaatatttatttttatgtgagtttgttaattttttaccgctggcttctgggtgttttcctcagagtatttatttttatctatttggctaaattttctctggtacttttctaattctctgcttctctaattgttttctgctttttaaaattctcaaatgtttgatccccgtggagtttattttgtgatagggagaaaaggtctcatttgcaaatagaaaaggtggagagttgtgtatttgttcccttgataatgactggggctggggtgtttccttagggacgacctggcccagctgcccttcctgaccatgtgcgtgaaggagagcctgaggttacatcccccagctcccttcatctcccgatgctgcacccaggacattgttctcccagatggccgagtcatccccaaaggtgcccacagcctcagggggagaagcctcccgggtaggaagatggttccctcaggggatccttgtcctgactgcccctttctctcccacaggcattacctgcctcatcgatattataggggtccatcacaacccaactgtgtggccggatcctgaggtgctgccttccccattcaccaccaccacccccatcctctacttttgtgtgtgtgtgtgtgaattccaaggttcctagtggagggggcagggttttgatgaggaaaatccaacatcacctcaccccaaaacacacacaagtgtctctccaaggctgctggacataggaaatcccactggcaaaccttctttgtctcacctgcaggtctacgaccccttccgctttgacccagagaacagcaaggggaggtcacctctggcttttattcctttctccgcagggcccaggtaagagcgccctgtgtctgaggcagggatgggatgatgggtgcgggagttaaaaaaagggggacgttgcagatggtcccagttccagctctccttccctccattccttcacagtttatgggaaaacgtccatagaatggggatgagtaggtcctagaggggtccgcggagtgctcaaaatccccttctccatctgctggtctgagctgggagctggagtcaggcccagtctccgggacatacaagcccacatgggagtcccaggcacgcttagtctttctctctctctctcaggctgagctgggtgcagttgggggtcccaggccaggttcctgggttgatgggacccaaatgcgggtcttgggcacagtcacagtccccactcccgcctgcaggaactgcatcgggcaggcgttcgccatggcggagatgaaagtggtcctggcgttgatgctgctgcacttccggttcctgccagaccacactgagccccgcaggaagctggaattgatcatgcgcgccgagggcgggctttggctgcgggtggagcccctgaatgtaagcttgcagtgactttctgacccatccacctgtttttttgcagattgtcatgaataaaacggtgctgtcacctctgcctgggcctcactgacagcctgcagggggctcttggggactgggaggcttcagggaaggggcctaacctgggtgggttaggcgggatgttttccctgaaaccaagaacctgactgcctctttggctgagcatagggcctccatgcttatagcagggtctctcagagcccaagtatggactttatcctgtggacaatgtggagccatgggaggtttttgagcaggagagggaccaggattaagaacggatttaagaggtacgactgaggctaagtgagaagcaaccataggggcagatcctttcttttggtctgggagtgtcccaagaccgaggtccctggccagttcagaacacaaggatagaagggtgcagcttataccctggcaggctctcaggagttctgtttcctttcttgctaatgtcccaccctatgtctcccccttccagttgatcgcttttgtgacccctttccctaacttcaggcagctcctatttttcctcttttgagccctctgactctgcccaggctgcttgtccatcagctgctatctgaatcctccccctactctcttctgctatgtgccaggcactctcacaagtgtcaggggttgggcacgtcttcaccctttcacctctagattcctccttcattcccatcactgacccatcttggggtggggtgcagtcaggaacatcctgtttgacccttgagattcaaagacagatgactggaaacagaacaccatcccaaaggtatgggatctggagccagactgttgggctgaagtctcatctttgctgtgtgacttgagtaagttaattcccctctatgcacttcagtttcctcaaacatataatgtgggcaacaacactacctaactcagggttgtcctgaggacaaaatgtggagaactcagaacttgttgcctggtgcatattggatgcttaataaatgtggccattattacctcctctctgagaaagtctggctaataaaccatgttgcctttcaagatagtttttttctaccacgactttaaagactgtcttggaacttacaggcaaaaattgtaatatttgtgctccttgaataatctcttgccttttagagggctgtgcatttaggaggcaattttttctaagactggttgcgggcacctgaaagtgcaaggtggtaggagaaggaaagaagcctcagttaatgttttaaaatgatgtcctgccacaaacattgacctctgttcatagcctaaggaattctgcaccgctgcaccctgcagacttgtcaaatcttctctccagctcatattcctcccttgttacactcagtcaccttgtccttgattcttatctccaaatacattatattttcttgtttagggccattgtacttccttggaactcttgtgaaagatcagttgcctatacttaacgtgggtctattttctgggatttgtattctggtccattgacctatttgtcttttactaataccacaacatcttgattactgtaactttacagtaagtcttgaagtgggatattgtcattcctcaaacaatattccacttcttcaacagtgtgttgactattctaggtcttttgtctctccatgtgcattttagagttagtttgttgatatccattaaaaaagccttcttaaatttttactgggactgcattgaatctacataattacttgggaagaactgacatcctgagaatattttctgccttataagaaatgctcaaggaagtcctgcatctggaagtgaaaataggataactaccatcatgacaacatacaaaagtataaaattatctggcagaaactggaaaaaacttcacagtgtgaacctttacacactattttgtcttccaagtggaagaagcatactaacaatgccaccaatccaccatctcaggaaaaaaattaataaactgtcttttctgtaatccccttttcaatgggggtgaggtgttatctcactgtggttttgatttacgttttttgagaaccaaaagcaaacaggagtagctatatttatatcaggtaaaatagactttaagttaaaatctgtaaaaagagacaaagatgtttattatataataataaagggatcaattcaactagaggaaataattgcaaatgttgtaaatatttacaatattatttacacccaatagtagagtacccagatatcgaaagcacacattattagatctaaagagagacatatactgtgatacaataatcactggggacttcagcaacccactgtcagcattggacagttcatctagactagcagtctccatcttttttggcaccagggacgagtttcacggaagacgattttcccatggacgaaggtaggggatggttttgggatgattcaagcacattacacttatcattagatcctcataaggagtgtgtaaactagacgcctcatgtttggagttcacagtagggttcacattcctatgagaattgaatgctgctgctgatctgcatccgatcagcagggcaagaggcggagctcacctttgcttgcttgcccaccactcacctcctgctgtgcagcctggttcctaacatgcatcggattggtattctatacatacatatattaattaatatatattataatatgtctttcctttttttggtgatcttttcagtgtctttcatcagtgttttatagttttccttgcagagatcttttgcctacttatttaaattaatttctatgcaatatatattactaagaaatagtataatacatatgtgtatatatattatatatatataacttagaaataaatttaacttactcagttaaatttatttctaagtggctgggcgctgtgtctcatgcctgtaatcccagcactttgggaggctgagccagttggatgacctgaggtcaggagttcaagaccagcctgaccaacatggtgaaaccctgtctctactaaaaatacaaaaattagctgggcgtggtggtgtgtgcctgtaatctaaactgcttaggaggctgaggcaggagaatcgcttgaacccgggaggcgaagatttcagtgagccgagatcgcaccattgtacttcagcctgggctagaaaagtgaaattccatctcaaaaaaaaatatttctaagtaatacagattactaagaaatagtatagtgtatatacatgacttaaaaataaaaataactaagcagatgaaagagctctgcaaggaaaactataaaatactgacaaaagaaactgaagaggtcacaaaaaaaaatagaaagacattccatgttggaaggaacattattccaacattagttggaggaactaatattgtgaaaatgactcagctaccaagaacattctacagatttaatgcaatctctgccaaaataccagtgacattctctagagaaatagaaaaaaacagattctaaaatttatatgatatcatagaacactacacagagttgaagcaatcctgagtgaaaagaagaaatctggaagaatcacactatctgacttcaaattatactacaaagctatagtaatcagaacagtatgatactggcataaagagagaccaatggaaaaagaccaatggaacagaacatagaacccagaaataaatccatgaatttacacccagctgaatttcaacaaagttgccaagaatattcaatggggaaaggacaatctcttcaataaatgatggtgaaagaactgaatgtgtacatgcagaaaatgaaaccagatgcttatctcttaccatattcaaaaatcaaaccaaaatggataaaagacttaaatgcaagacctgaaactatgaattactcgaagaaaacattggggaaatgcttaaggaaactgatacgggcaagaagttttttgataagaactcaacagcataggcaacaaaggtaaaatggtgaaatgggattaaatccaacaaaaaagcttcttcagagcaaagaaatcaatcaacaaagtgaagagacaacctacagaatgagaagaaaaatttgcacgttttcagtctgacaaaggattggtaatcagaccatatgaggaactcagacaactaatagcaaaggaaacccaaaaataattcgagtaaaaatgggcaaatgatctgaatagacattcctcaaaagaagacataccaataggtatatgaagagttgctcaacattactaaccatctgggaaatgggaatcaaaaccacagtgagataacatctcacccccattgaaatggggattatagaaaagacagtttatttatttttttcctgagatggtggattggagggattgttagcatgcttctcccacttggaagacaacatagtgtgtaaagattcacactgtgaagttttttccaagaagtgacacaggaacttaacaggaaaactgaaagaaaccaccctttgaaagaagcatcaggctgcagcctacaccacgagccaggtggacaactgtaagtccccagagtgtgagagagggtaaagtgcctccaggatatacagtcccaccggggaacctggtaatccaggccacagggaaggtcttaatccttccttgtggcaggccaactgggtggctgggtcttaatccttctgagtactggagctgacttagtaagtggtgggagtatatgagaagtggcatcagggcaggcattcccagtctctggcattcccagtctccagcaggacaaagggaagccattcctgatcctacctcacaggggacctcatggacgtctgccagctaacacaggtggtggtcacaggttgagagaaactcccaactgagattcacaatataatctcaagtagggataactcccccgtggtcagaccaagaggcaagtgggaagtgagctgcagcaaccagcacaggagcttggtgttcctgcttaatgggcaaacctggagaggtgtggcctgaaagctgcagatactggctcagcattggacttttgtgtccctgcttaatgggcaaacctggagaggtgtggcctgaaagctgcagatactggctcctcagggaaggcgtatggcctggggcacatttgaattctgagcacagactgcctggaacctagctagctgctgctagtggaacactgtgggtgcaagacctgtcttgccaagagtgtaggagctgggtgtggcttattgccacctgctactccccattccccatacagactcttctgtgaagcagaggcagctgtgctcctccctggacattattcctgcaaccagagaaccactctctgatccccagtggggctactgcttttgtccagaggtggagagccagagtgcggacttgcctgattgagctctcacttggctttgcccctccacctgccctgatatattaatacgtagggcagaaatttttgggagccctatggcccccccgcccggcccgccactgcctgagacgcgagagtacctcctctgggtaacataagacagacacaaattccactgctaccaccacagctggtgttattttgcaagcgccacctcctggctgtgggccaattgacagagtccattatagtatctgcttgcaagcacaataacagccagcaggaaggagaaaacttgtgcatgacctcagctatcactattgcctgcatccatctggttaatcaggaagttctgagtctgtccacatgaccagtttgttagtaccacagctggcatttgagaaagccaacacactaaggctacttataactgagcaatctcacagaatctacatcactccccttcttcccccatcagagctggggctggtaccactgctgggggttttgaggatccgttacttgattggccccttgcagatattctccagcaccagcataaattgtggcagccccactgggtggctagaccaagaggagccgcagccttcatagtagtctggctctctgagactcctacttctagggggaaggggagtgcaccgtatcaatggagcacaccatgggacaaaagattccagatggtagaccttgagtcccactttccgcatatgagaagttgcttttctttttctttttttttttttttgagacagactttcgctctgtcccccaggctggagtgcagtggcgcaatctcggctcactgcacctgggttcaggcaattctcctgcctcagcttgctgagtagctggggttacaggcgcctgccaccgtgcccagctaacttcttgtatttttagtagagatgaggatttgccatcttggccggctagttttcaactcgtgatccactcgcctcagcctcccaaagtgttgggattacaggcttgagccgctgtgcctggcaagaagtttctttcagcagaggcataggtgcagtgctgggttcagtggcggaaatgtctgcagatctacttcaacagtcaggcacttctggggatcaatgaagggtcttagagaaggggactttttcttccccttgtccactactgcagacacagctgcagcttctcccatgacagcttggcatggctacacatgtagacattcattctctctggaatagttcagagtgactgcattctataggaggagcactctccaggttcaggcttgcatgagtggcagagccccagtccctctctacagggaatatcagcattcctgcaaatgaaaagaggtgcctatctgatctgactagtcagatcactgggtcaggagtgtatctgggaggtgggtaggtttcctgctgtcctggcaggggagctgaggaggctccctcccttccccttgaaaagacctccatgtgtttccctgagagctcccccaaccacatctgtcaaggatggcacctttgccccccactgggaactgcattgaccaaactgctttaaccacagctggtttttattcatggatacctcccttgagtggcctaaagcctgaactgttcatccaggtaaaaaaaaaaaaggttggggggatataaataaataaataaatgcatactactggggaatgagataagcttcaagagacctctgcccttccaacaccaacagaaacagtgaacctgccctcacactgagcacattgctactacaactagcatctgagaaagccaccatacaaagactccgtataaccaaggaactcatacagagtctgcacccacgaaagcacccagagccataggttacaataaactctaaacatcaaagtcacatcctcaaagggaaaaaagatctaagaaacatcacaattaatcaaaaataagttcaaaaataattagaagaagcagtctaaccaggtgagtggaaatcagaaaaataattctggcaatatgacaaaacagggttctataacaaccattagctctccagcaatagatccaaaccaagaagaaatctttgaaataccagataaagaattcaaaagattaattattaagttactcaaggagatacaagggagaactgaaaaccagcataaataaatttaaaaattaattcaggatataaataaaacttttctaaagaaatagctattttaaagaaaaatcaatcagaaattctagaaatgaaagacacatttagagacttacaaaatgcaggggaaagttttgaaagtaggcttgaccaagtcgaagaaagaatttcagagctcaaagacaaggctttgagttaaaccaattagacaaaaataaagaaaaaagaactaacttttttctttcttttttttaaaaaaagaaaagaaatggaaagtgtacccaagaaatacaagattatctataatggccaaatataagtatcactgatgttcctgaggaagaagataaacagaaagtttggaaaacttagtttagggaataactgaggaaaactttcctggtcttgttagagatttagatatctaaatataataggctcaaagaactcctggggaattatttgcaaaaaggacatgaccaaggcacatagtcattaggatatctaaagacaacatcataggaagaatgctaagagcagtgaggaaaagcatcaggtacctataaaggaaaacctatcagactaacaagacttctcagcagagactttatgagccagaaggaattagggtcctatcattagctaccttgtacagaaaaaactgtcagccaggaattttgtatccaacaaaactaagtaaaaacagaaggagaaataacatctttttcagacaagaaatgctaagggaatttgtcctaatagaccagtcctacaccagctaaaacctgttttgctaaactacatttatgcacaacgagcacagagataaactaaaccaaaaaaaagtatgaatgaaaccactgggatccttctatccccaccaccaatgattgctaattactaattgctaagaggatttctttttttttttctattaccaaaatatccatttgggtttattcaaattttttttttatttttttatttattttattttattattattatagttttagggtacatgtgcacaatgtgcaggttagttacatatgtatacatgtgccatgctggtctgctgcacccattaattcgtcatttagcattaggtatatctcctaaagctatccctccccactccccccaccccacaacagtccccagagtgtgatgttccccttcctgtgtccatgtgttctcattgttcaattcccacctatgagtgagaatatgcggtgtttggttttttgttcttgcgatagtttactgagaatgatgatttccaatttcatccaagtccctacaaaggacatgaactcatcattttttatggctgcatagtattccgtggtgtatatgtgccacattttcttaatccagtctatcattgttggacatttgggttggttccaagtctttgctgttgtggatagtgccgcaataaacatatgtgtgcatgtgtctttatagccgcatgatttacagtcctttgggtatatacccagtaatgggatggctgggtcaaatggtatttctagttctagatccctgaggaatagccacactgacttccaccatggttgaactagtttacagtcccaccaacagtgtaaaagtgtcctatttctccacatcctctccagcacctgttgtttcctgactttttaatgattgccattctaactggtgtgagatggtatctcattgtggttttgatttgcatttctctgatggccagtgatgatgagcattttttcatgtgttttttggcgcataaatgtcttcttttgagaagtgtctgtttatatcctttgcccactttttgatggggttgtttgtttttttcttgtaaatttgtttgagttcattgtagattctggatattagccctctgtcagatgagtaggttgcgaaaattttctcccattttgtaggttgcctgttcactctgatggtagtttcctttgctgtgcagaagctctttagtttaattagatcccatttgtcaattttggcttttgttgccattgcttttggtgttttagacatgaagtccttgcccatgcctatgtcctgaatgataatgcctaagtttacttctagggcttttatggttttaggtctaacgtttaggtctttagtccatcttgaattaatttttgtataaggtgtaaggaagggatccagtttcagctctctacatatggctagccagttttcccagcaccatttattaaatagggaatcctttccccattgcttgtttttctcaggtttgtcaaagatcagatagttgtagataaatggcattatttctgagggctctgttctgttctattgatctagatctctcttttggtagcagtaccatgctgttttggttactgtagccttgtagtatagtttgaagtcaagtagcgtgatgcctccagctttgttcttttggcttaggattgacttggcgatgcgggctcttttttggtgccatatgaactttaaagtagttttttccaattctgtgaaggaagtcattggtagcttgatggggatggcactgaatctataaattaccttgggcagtgtggccattttcacgatattgattcttcctacctatgagcatggaatgttcttccatttctttgtatcttcttttatttcattgagcagtggtttgtagttctccttgaagaggtccttctatctgatctttgacaacatgacaaaaacaagaaatggggaaaggattccctatttaataaatggtgctgggaaaactggctagccatatgtagaaagctgaaactggatcccttccttacaccttacacaaaaattaattcaagatggactaaagacttaaatgttagacctaaaaccataaaaaccctagaagaaaacctaggcaataccattcaggacataggcatgggcaaggacttcatgtccaaaacaccaaaagcaatggcaacaaaagacaaaattgacaaatgggatctaattaaactaaagagcttctgcacagcaaaagaaactaccatcagagtgaacaggcaacctacaacatgggagaaaactttcgcaacctactcatctgacaaagggctaatatccagaatctacaatgaactcaaccaaatttacaagaaaaaaacaaacaaccccatcaaaaagtgggcgaaggacatgaacagacacttctcaaaagaagacatttatggagccaaaaaacacatgaaaaaatgctcaccatcactggccatcagagaaatgcaaatcaaaaccacaatgagataccatctcacaccagttagaatggcaatcattaaaaagtcaggaaacaacaggtgctggacaggatgtggagaaataggaacacttttacattgttggtgggactgtaaactagttcaaccattgtggaagtcagtgtggcgattcctcagggatctagaactagaaataccatttgacccagccatcccattactgggtatatacccaaatgactataaatcatgctgctataaagacacatgcacacgtatgtttattgcggcattattcacaatagcaaagacttggaaccaacccaaatatccaacaatgatagactggattaagaaaatgtggcacatatacaccatggaatactatgcagccataaaaaatgatgagttcatgtcctttgtagggacatggatgaaattggaaatcatcattctcagtaaactatcacaagaacaaaaaaccaaacaccgcatattctcactcataggtgggaattgaataatgagatcacatggacacaggaaagggaatatcacactctggggactgtggtggggtggggggaggggggagggatagcattgggagatatacctaatgctagatgacgagttagtgggtgcagcgcactagcataaacaataagagaagaagagaggaataaaagatatacaaaacaactagcaaacaatgaataaaatgacagaagaaggttcttacctataataactttgaatgtaaacagattaaatcccccacttcaaatatatagactggctgaatggattttttaaatgacccaactatgtacttcctacaagaaattcactttacctatccagaaacatacagactgaaagtgaagggatggaaaaagacattttacccaagtggaaaccaaaagcaaataggagtggctatgtttatatcagataaaaataaaacagacaagggataaattcagcaagagcatataacaatagtaactctatatgctcccaacactggaacacctaaatatagaaaataaatatttttaaatctaaaaggagagatagactccaatacaataataattgtggacttcaataagccactctcaacattggacaggtcatctagacagaaagtcaacaaagatacattgtatttaaatttaatttcactttagaccaaatagacttaatagacattgacagaatggtttgtgcaacagctgcagaatacactttttttccattagcacatgtagcccacacattgggctacaaaggaagtctcaagaaatttaaatgtactgatatcagagatcgagaccatcctggctaacacacagtgaaaccccgtctctactaaaaatacaaaaaaattagccaggtgtggtggcaggtgtctgtagtcccagccacttgggaggctgaggcaggagaatggcctgaactgaggagtcagagcttgcagtgagccaagattgagccactgtactccagcctgggtgacagagagagactccgtcccaaaaaaaaaaaagtactgatatcacgttaagtatactttctgctggcaaggaaataaacctagaaatctgtaacaaaaataactttcaaaattgtacaaatacatgaaagttaacaacatgctcccaaacaactaatgaataaataaaatattaggaagtacatttaaaatttgttggattaaattaaagtataagcacaatatatcaaaagctatgagatacagcaaaagcagtattaagaaggaagtgtatagtaataaacacctacatcaaaaaagtagaaagatttcaaataaacaatctaataatgcacctcaaagaactagaagagcaaaagcaaaccaaactcaaaattagtagaaaaaaatgaagtaataaagattagaacaaaaataaatgaaattgaaagtaaaaaataaaatacaaaagatcaataaaacaaagagttgggtttagctagaccaagtgagaacaaaacatttagctagaccaagtgagaacaaaaagactcaaataaatgaaatcaggaatgaaaaaggaggagacacaacagaaaatctaaacaggctaattacaagtaatgaaatataatcagtaataaaaactctctcatcaaagaaaagcccaggacctgatggctttaaagatgaattctaccaaacattaaaaaaaaaaagactcaataccaattcttctcaaactattccaaacatcaaagaagaaggaattcttcttaactcattctatgaagccggcattacccttataccaaaaccagaatgggatgcaagaagaaaagaaaaccacagaccagcatctctggtcaatagaggtgccaaaattctcagttacatactagcaaactaaatccatcagcacgctacaaagataatttactatgatcaattgagctttatcccagggatgaaggatgttttgatacattcaaataaaaaatgacataacatcatatttattgaagagcaacagagtgaatagcaaaaatcatatgatcatctcaataaatgtaggtaaagcatttgataacattcaaaatttcttcatgataaaaagcactcaacaaagtaagtatagaaaaagcatacataacaaaataaaggataggcatgacaaatccacagccactatcacacaaaatgggcactgaaagttttcctctaagaacgggaacaagagaagtatgtccagttccaccacttttattgaacatagtgctggaagtcttagccacagagatcaggcaagagaaagaaaagagtgggcaaggatgtcaaattttccctgtttgaagatgacataatatgtgcatagaaaaccctaagtgctccaccaaaagtctcttagaactagtaaaccaattcaggaaagcagcaggattccaaatcaacctacaaaatcactagtgtttccatacacaaatgatgagctagcagaaaaagaaagaaaccaatgccatttacattaggtagatatgtatatgtgtttatatatatgtgtgtgtgtgtgtgtgtgtgtgtgtgtatatataaaatttcttaataaatttaaccaagtagttgaaagatctctgcaagaaatactataaaacactgatgaacgaaatggaaaaggtcaccaaaaaatggaacatcatctcctgttcatgaattggaagaaataatattgtgaaaatgactctactactaaaagcaatatatagagagaatgcaattcctatgaaaataccaatgagatttttcacaaaatttcaaaaaattctaaaatttatgtggaatcacagaagactccaaatagcaaaatccgtcctgaggaaaaagaacttagacggagatattacactaccaacttcaaattatactacaatgctgtagtaaccaaaaacttatagtactggtataaaaagagatgcatagatcaatggaacagaacagagaatccagaaatacattcatgaatttagagccaactaatttttgacaaaggtgcaaagaccattcagttagaaaaaaacagtttcttcaataagtcgtgctgaaaaaactggatcttcatatttagaagaatgaaactagacccctaactctcaccctattcaaaaatcaaatcatgatggatgtattagtcagggttctctagagggacagaactaataggatagatgtgtgaaccccatttctggtgccaaaatctgtattagtcagtgttctttagagggacagtactagtaggatagatgtatgcataaaggggagtttattaaggattattgactcacacgatctcaaggtgaggtcccacagtaggccatctgaaagctgaggagcaaggaagccagcccgagtcccagagctgaagaacttggagtttgatattcaagggcaggaaggatccagcaatggagaaagatgtaggctgggaggctaagccagtctagtctgttcacatttttctgcctgcttttattctggctgcactgacagctgattagattgtgcccacccagattgagggtgggtctgcctttcccagtccactgactcaaatgttaatctcctttgacaacaccctcacagacacacccaggaacaatactttgcatccttcaatccagtcaagttgacactcaatattaacaatcacaatagattacagacttaaatgcaagacatgacactttgaactagtagaagaaaatatttgggaaacacttcagaacattggtctgggcaaagattttttgggtaagacctcaaaagcacaggcaacaaaaacaaatagacaaatgtgatcatatgaatctaaaaagcttctgcacaagaaagaaacaaatcaacaaagtgaagagacaacctacagaatgagaaaaaatatttgcaaattatccatctgacaagggattagtaactggaatatataaagaactttactcaatagcaaaaaaaaaaaaaaaaaaaaaacaaaaaaaaaaaaaccaaaatcattctattaaaaaaattaggcaaactatctgaatagacatttctcaaaagaggagatacaaatggcaaatagatacattaaaaaatgctcaacatcactaatcatccaggaaatgcaagtcaaaaccatggtaagatatcatctcactgctgctaacatgtgtaattctttttatacattgttggattcgatttgatattttgttgaggattttgcatctaggtttgtgagcaatattaatctgtataattttttgtttcttaatttcttcttttttttcttctttctcttttctttgatttcttgtaatgtctctgtctgtatgtggcattagggtaccgctggcctcataaaatgagttacggaatattccccctgcttctgtctttcaaaagacacagaagaaaattggtataatttcttccttaaatgtttggtaggattcatcagtgagccaactggggtcttggctttctgttttggaaggttattaatgattgtttaatagatataggcctatttggattatctactagcactttccttttcttcctttctttccccttctcatatcttttggatagatggaaggtgaatgatggtatataaatgtgattcaaaattatgtagctgataaaaattgtaacattgatagagaaatataggccctatatgcattatttaaatacctatataataagcataaaacatgtttatgcagtaagtacaaagattaaaggacaatatgaaaagtgtagttaggtgaatcttacaagttatttagagaatgtggaaggctagttaaacagagtgacatacagaaaagaagactagtattaaatcagtggcaatatccttctgtgttcggccactcttgtgttcctataaagaaatacctggctggtgtatatgtgccatattttcttaatccagtctatcattgttggacatttgggttggttccaagtctttgctattgtgaataatgccgcaataaacatacgtgtgcatgtgtctttatagcagcatgatttatagtcatttgggtatatacccagtaatgggatggctgggtcaaatggtatttctagttctagatccctgaggaatcgccacactgacttccacaatggttgaactagtttacagtcccaccaacagtgtaaaagtgttcctatttctccacatcctctccagcacctgttgtttcctgactttttaatgattgccattctaactggtgtgagatgatatctcatagtggttttgacttgcatttctctgatggccagtgatgatgagcattttttcatgtgttttttggctccataaatgtcttcttttgagaagtgtctgttcatgtccttcgcccactttttgatggggttgtttgtttttttcttgtaaatttgtttgagttcattgtagattctggatattagccctttgtcagatgtgtaggttgcgaaaattttctcccatgttgtaggttgcctgttcactctgatggtagtttcttttgctgtgcagaagctctttagtttaattagatcccatttgtcaattttgtcttttgttgccattgcttttggtgttttggacatgaagtccttgcccacgcctatgtcctgaatggtaatgcctaggttttcttcgaaaccatcattctcagtaaactatcgcaagaagaaaaaaccaaacaccgcatattctcactcataggtgggaattgaacaatgagatcacatggacacaggaaggggaatatcacactctggggactgtggtggggtcgggggaggggggagggatagcattgggagatatacctaatgctagatgacacgttagtgggtgcagcgcaccagcatggcacatgtatacatatgtaactaacctgcacaatgtgcacatgtaccctaaaacttaaagtataatttaaaaaaaaaaaaagagaattgtccaagtgagaaagacaaggagagaatataaacattaaactaatgctgaggttggtgcacaaaaaaaaaaaaaaaaaaaaaaaaaaaaaaaaaaaaaaaagaaataactggctgggtatggtggctcatgcctgtaatcccagcattttgagaggccaaggcgggagaataggttgaggtctggagtttaagaccagcctgggcaacaaagcaagactgtatctttaaaaagaaaacaaacaaacaaacaaaaaggaaatacctgagacaggataatttataaagaaaagaggtttaattgaatcatgactctgtaggctgtacgggaaacatagtggcatctggttctgaggagccctcggggagctttgactcatgttagaaggcaaagcaggagcaggcacatcacatggcataagcaggagctagagagcaggggcaggtgcaacacacttttaaatgaccagatcttgtaagaactcactaacacgaaggctgcaccaagccatgagggatctgcccccatgatccaaacacctcccaccaggcaccacatgtagcactggggattacaattcaacatgagatttgggcagggacacagacccaaaccatatcaacctctaatgccagtagaaccactgactagcttcaggatctcaagaaaggattttaaagctcaaatagtcccagcactgtaataattacaggagaaaatgtaactacaatgtttggaagtagcgtctactcaataattgtgattctctgttcttgtccaatcctatgtttaatataaaaactcaactaaaggtaagtaaaagcactggggaatgaccttgccatgtggtattaaggagaagattctcaagcacaactgcctcagttgaaattaccaaatctgcatatagaaggaagatgtgagattttttattcaaagttaactagaaacccagcatgaggcagatggctgggagcagtccagggagtgtccaagatctgacacagaaaatcatgttcggaggggaggcttgttgctcattcccttttgtgtccagctgcctgggttcccttctccaccgttttatttgataataagctatctggagaacttgctgagcccagtgctgagccaagaagagaaatatgtgagctttgaaggtgcagtttcatttcgaggaatagagaatatctattcaaagttggggcagttcagagcagagtgagctgcaaactgttgtgcaggtatggggctggaaggcttcatacaacctcatagtcctgggacccaaacttttattcagaccatggaagcaggtgtgacaagagttgggcaaggcagacctttaattcaccctgataggctggagtgtgggcttatggcatttctcctttgacccaattaacctccactcccaatgtatctctgtgcagaaggctaagctaggtgtgtcagacattgtaaatcctcaacataaattataatttaacctagaatacagagactatgtagcaggaggagaggaaatgtggagatattaatctcttctcccttatcagaaaggaacctagcgtaagaaatttcatgcttaataggccaaagagtaaatcagaaaactccatgggtgatggtatgctcatggtggtggtggtggtggtggggaattctttgccctgtgacctcccttggattaatttgtccccagcacaatgggaaaaaacatttaatcctcggagttttaaaaatttatttatttattttttgcctgagagtgactctgatcctgtttctgacggtcatgttcgtcagcattgtagtgagtaagtcactggccttgtagcttctggagtgatgggagtgatccaagatccccagttcccatgtcacaaatgaggatcccacacatctggggcagcgatggaaaaggaggcatggctggagggttagggtaggctaattgctgctgggatgggagaggatgcagagggagctgtgtccctcctctctatccccagctttggaggaaccacgtgtgctttgtcagctgaagttggagcaacattcaatggtgagtgccctcttacaaacagctcaatgtgaacataatgagaacaccagggtctgctggaggcagagtggcctggtggtaagaactcaggctctggggtcaggcagagctggttcaagtcctggctctgcatcttctaagatgcacatctcttggttagagccttaacctcaccaaacctcagttgcaccatgttcacagtatcccacctctgaggctgctgttggcagtaatgagatgatgtggacagtctcaagaggtggcacatggtcacctctaggaggaagggcatcaggtgtgtgtagaatgtagtgtgggcttggggcaggaagtgagggagtggtgagagatgaagagaggtgaggagaacttctagaattgaaggtagctactcttgttacaaaagcagctgacgggctgtattagggatctctagagggacagaactaataggatagatgtatgtataaaggagagtttattaagggatattaactcacacaattataaagtcccacaataggccgtctgcaagcttaggaccaaagaagccagacctagtcccaaagctgaagaacttggagtccgatgttcaagggcaggaagcatccagcatgggagaaagatgtaggctgggaggctaagccagtctaatctctccacattcttctgtctgcgttttattctggccactctgacagctggttagatggtgcccacctggattgagggtgggtcttcctctcccagtccactgactcaaatgttaatctcctttggcaacaccctcacagacacaaccaggaccaatactttgcatccttcaatccaatcaagttgacactcagtattaactgtcacaaaggcccacagagctggaccccatcccagacgctgactgcatggccctctcctacctctgaggttgtcttgaccacctcaccctcaaaacccctagagtcagccaccgcagtgcagctgagctcactgggggtgcttctggcattctgagtcaggggatagcgggcctgatgtcaggggtgaggagagctggtcctgggggcagtgtgctgcagtgggagctggacaaatcccctgatccttgggggctgaaacaggagctggaaggagcctgtgtcaaaacatggacctgggagggtttccaagtttagagaagcctggagcccgcttgaggactggggatcaggcatttgacctcctccaccacccagtagcctctgagacactgacatagctgcgggaagagctaagtagcaataatgagcataatttggagactcaggagacaccatcctagggacccaggtcgtcctcaccggcccctgacagctccttgcttgggtctcccagtgacctaggaacaggctgatgtgaagtgcaacccagacttcatcctgtgccaagtattctgggaagtgagaggagggtgcaggggtcatagagggtctgcctcattcagcaccagggacagcgatcgaccccggactccttggcctctgtggctgcagggacactggctcaggtgcatcccatacactcctgcagttcagagtccaaggcgtgagcaccttgcagggtcccacagagtgggggcttgggaggaaagatgacaccatggactggagcagagcatgagttgatgaggacaggaccacagctaggatatatagcaaatgtccagtccagaaaccatggaaccagagttaaggaagaagcattgtgctgaaggaaggcaaatgtactcaagaatcccccagaaggatggagtgaagttctggtaaagggaatggaaatcaaggaaaactcaaagacagaagggagccagaatatgggtgccattgaatgtcctgctgaggaattaggactaaatcttctagacagtgtttctgccagtgtgccctttgggatgctagacacctcagataatatatattcagaggactctggatatcactaagcttggcaaaatgacacattgtccattatcctcctaaaaattcacaattattataacatattaaaagtactatgactccctgcaataaagaacttcctgtttcatattgcttgatccataatttagacacacacacagacacacacacttgcaatttaaaaaaaaacagtaggcatgacaataggagaaatgacagccagtttggtttatgccaaaattagacccttgaggcagttgagaaattgtcttgttggaaaacctctccaagctccagaaaggggaatttacaaggtctcaagtattctcaaagcccaaaaagagtttcatgtgaaagttgaagctgagccatctttccacttgtaaatgtccttcaggtaccatctcctgaggtcagtgcaataatagtcaccatctttagttggagtgatgaaattctgcctaagaaaaagatatagtcaagagatatgtgggaccatagctaagaccaggggttgggtcgtcttctaaaaagaacaagacacagtggaccccacagacaggggccattgtcaatgtcacagttgaatgtactggctgaatgctctggcttgacatccatcagaaccattattaaggcgtatgtgatcattcaactcagacacatatgacactcaagcaccttgtctgaaaatggagaaaacaatgacattcgcctcaaaggctcagtgaagaaataagggcacagtgtagtgcctagctgagtgtgggataagtggtaattaagaatattattaaatggtattgataaaaaggtaaggagtttggctctacccagtataaatggttaggtgaatcaactagtccactgacatatatggagtcctgctgagtgtcaactcaagttccaggcactatggactcaaaggtgagtcagatcaagcccttgcccctggaagattgctcatgtgtggggtgatgcacctgtgatctgacagcacagtccagagttgcatcctgaaatgaaagcaggtgctgttaacattagcctcccaattggcagatggaggtgcagagagatcaattcactttaccaaagccacacagccaggaagtggatgagccaggatttgaaccttagtctgtctgagatgagtcagtgctgtgaagcaaggagctatccaggctatgctacaagtctccccttaatcattaatctgtgtttaagaaactgaagagaaacaaacaattcgcaatggtgatcagctggtctctgtttaaagaagaaaacaagcccctggagcattcaaccaaagtgatgtcatggggtctccaaaccaggcaattagtaaaatttatctgaacctgccacctccagccctgctctaaagctctcagtgcacatcgttcaaagcccccaggtatcttttctggaggacacagcagagaagaacatggttagagccttgattggtattaaagatcccaatgggacaactgtctgcacaactcgccaaactccactgcataacaatccccaggaagccaattctaagttttgatagtgaacaagccatgggattttcactaacacctggtgactcattaaaagttgacacacaatttccatctccacttcattttttttcttttttttttttttgcaaatgaaagggtctctaaggatcagctacagagctgcagggaggttaggtttgaatgcatagctcagggattaagtggagacagaaacacggctcatcttactctggggaaatggtcccagagagttttccatttagcctcaggtccaaacttaggtgtctgattagcagcaagagacataggtaggcattggaagtggctctttcttccccaagacactatagtcccagagctccacatagccaaatgttacagaaagcaccacagcatcttggacatcagaaccaaagtatgcaaagtacttggtgccaagagtggcccctgtgagcattttgtgctgcccgatgggatggagggtaaggtctccagagctccgaggtgggccaggcttctgcttcctccatcctaatacttaccacactctccttattatataaatgacttgttcaatacctactatctttctctactcaacgttccccccaagaagataaggccacactggatttgcccaaccttgtgttctcactgcttggcacctaatagatgctcaataaataatcgcagagaaaacaaacaaatgactctctcattgcaaccccattccatgtctgtgagttgcaaaacccttctaaaatgtggatggctattctccagttaatctgaaattcattttgtagatgtagttgacatcatttgaacccacctgcccttatgtgtgtatcccctgtgtcaactcaggtctgatggattatggggaaaggtcctttggatgcaaacctctgcctgtcttttaggctccttgagccactcctcactcctagctgcccaaggccccttccatattggccttcttcggttccttggatgagcagtcattttcccaccctaagtcctttgcacatgcccttccctctgcttggtgcacaacctttcctctccctctgcagaatgactcaaatgaagtgctacctcctccgtgaagttctctcctatcagcctgtcctgctttctgaggattcatttgcctactcctgtagccactaccatcccttccttatgctcctcctgctcttgtctgaaattcagttattcatcatctaccttctctcctccactgtaaagtccacaagaacaggcactaagtctgcactggccattgcagtgtccacagctcctggctcagtgatgagctccaatgctctggatacatctgttaagtgtgtggtagctgaggctgaacttcctctgagctggagataagagttatctcatgcacagtctttaggggttgaggctgatcactctcatcatcttaagcagccagtgtggctctttctatttctccctgttaccaaagagcagatcaagcatgaggttacctgtttctactaatatttattgtcaggcagtgcttatctcagatggaggagacctcttgagcaagaagttgaccaagacattgaagagcccttcaacccaactcagccttccgatctttagtgaaaatgttatcctatgaatatttatgacacacctaatatgtgctagaatggtgactgcgacctggattccacctctaagagcttctgggcaaagaagggagacagaccagtgcatcagtcattcagataccgcaagataaatgcaatgaaaatgctgcaggctcctgcttacagcccttttcccttctctgaaactcattgaggtgaaaagatccaaaaaaggaattcatctagaataaattaccattaatactaaagagaacctgcgtggcttgtttcacttgacacaatgtcttctaggttcatccatgttgtcgtgaatgagaggatttccttctttttcaaggctgaatagtattccatgtgtatttattacctcatccatttatccgttgatgtacacttaggttgattccatctcttgacttttgtgaatagtgctgcaatgaatgtgggagtgaagatatctctttaatatactgatttcatatcctttgggtatatactatacccagattatatgatatgctggatattatatgctggattatatgataattccatttttaattttctgaggaacctctatactgttttttataatggctgtactcatctacaatcccacctacagtttacaagagttcccttttcttcacattcttgccaacattttttttatctttcatctttttgatgttggtcaaagaacataaaatttcagttagacaggaagaccaagagatctagtgcatcatgatgactataattaataacaatctattgtatatttgaaaattaacgagagtagattttgagtattgccatcacagaaaagaatgataactatgtgggataatgcacatgttaacagtcttgaatgaaccattccgcagtgtatacagatatccaaacgtcatgttgtacagcataaatacatacacattaaaaaaatgagtatctgccagatttcatgtatttgggatcagatggaagaaacagaggaatttgtcgcacagtccctgactcaagggcagaatgcagtgaaaggaagtagatggagaagatgtttctttttcttttctctttcttttctttctcttttctttttcttttcttcctcctttctttctttctttctttctttctttctttctttctttctttctttctttctttctttctttctttctttctttctttctctttctttcttttctttctttctttctttttttggagatacagtctcactctgccacccaggctggagtgcagtgatttgattgatcccgggtgaaagttgcgtggggggaacaccgtcgtgtaccatcctcggcgcgtctccgtgagtggtgctgcgagtgcgcatgtctgcacgcatctccaggtgtgcatggtgccaggacgctctgcaggtgcgtgtccacctccgcgtgcagggtctctgcctctgtgagggctcaggtctgaacattcttgctagtgcgcgcgcgtgccggttgggtgcacgcttggtgttggcgacagagcctgcagcacgtggggagaggtggcaggcggatgcaggtacatggacaggtgtgtgagggacacagtgggcacccgtgtctcagtctgtggaggcggaagccgcccatccctgagctttcctgaggagcctccccctctgctttcagacacagctggggtggggctcagcgctgtcctgggcgggagcaggaaggctgagccgggacagcgctgtgggttctgcctcccttagctccggactgaccctgggcaccccaggaccctctcccttcctgagcacaggctaggctgtgaacacagtgcagagacagggagaggtagaacaaggctgagggtggcccacggtccattttttttttttttttttgagatggagtttcgctctgtcacccaggctggtatgcagtggcgcaatctcggctcactgcaacctcctcctcccgggttcaagcaattctcctgtctcagtgattctcctgtgattctcagtgattctcctgcctcagcctcctgagtagctgggattacaggcatgtgtcgccacgcccagctaatttttgtatttttagtagagacagggtttcaccaggtcggccaggctggtctcgaactcctgacctcaggcgattcacctgcctcagcctcgcaaagtgctgggattacaggcgtgagccaccgtgcccggccccatggtgtactttttaaaaattgaaataaaattctcataatattgaattaaatagtataaagtgtacaatttagtggtgtttagtacattcacaaggttgtacaaccaccacctctatctagtttcagaatatttttgtccccacccttaaaaacccgtacccatgagcaatcactccccattcccccctcccagcccctgtcaaccaacacctgctttctgtctctatggattggcctgttctggacatttcatagcaatgggatcagaatatatgtgactcttttgtctggcttcttccactcaatatcgtgttttcaaggctcctcattttgcatgggtcatgatccgtgttgcatgggtcagtgctttattcctttttattttttataggtatatagtaggtgtgtatacttatggggtacatgagctgtttggacaaaggcatacgatgagtaataattacatcagggtaaatacaggatccatcacctcaaccatcacctcaagcatttgttgtttctttgtgttacaaacattccaattatatatatatatatatatataatttttttttgacagagtcttgctctgtcgcccaggctggagtgcagtggcatgatcttggctcactgcaacctctacctcccaggttcaagtgattctcctgcctcagcctcccgagtagctgggactacaggcacatgccaccacacccagctaatttttgtatttttagcagagacggagtttcactatgttggccaggatggtctcgatctcttgaccttgtgatctgcccgccttggcctcccaaaatgctgagattacaggcatgagccaccacacccggcctccaactatacttattatattaactaattatatttagctcttataaaatatacattaaattattgttgattgtaatccccctgttgtgatatcaaatactagatcttattcattctgtctaactatacttttttacgcattaatcatccccactcccccccagctatgtgcactacccttcccagcctctaataaacatccttctgctctctatgtccctgaaagcaattcttttaacttttggctaccacaaatgaatgagaacatgcaaagtctgtctttctgtgcctggcttatttcacttgacataatgacctccagttccattcattttgttgcaaaggactggatctcattccttttttgtgtctgagtaatactccattgtgtatatgtaccacattttctttaactaattctctgttgatggacacttaggtttcttccgaatctgggctattgtgaatagtgctgcagtaagcatgagtgaagaaatctcttcaatgtactaatttcctggctcacatctgtaatcccagcactttgggaggctgaagtgggtggatcacttgaggtcaggagtttgagaccagcctggccaaaatggtgaaacccctctctactaaaaatacaaaaattagctgggtgtggtggcaggcacctgtaatcccagctaagtgggagggtgatgcaggagaatctcttgaacctaggaggtggaggttgtagtgaggtgagaatatgctattgcactccagcctgggcaatacagtgagactgtctcaaaaataaaattatgattttctttctttagggtatatgcctagcagtgagattgctggattgtaaggtagttctattttagtttttgggaaacttccatactgttctccatagtggctgtactaatttacatcgccaccaacagtgtatgaggattcccttttctctgtgttctcacctggattctctatcttttggacaaagctatttattgtcttctatcttttagataaaagctgttttaactggcatgagctttcaaaaatttagattaaatttatttaacctgaaattatcctttaaatattttaaagtggacaatcagtggcatttagtacattaacatgttgtgcagctactacctctagttacaagacattgtcaccattccaaaaagaacttcatatccattcatcagtcattccccatcccacgctagccccattccctgacaaccacacatctgctttctttctcagtggatttaactattctggacatttcttataaatggaattatatactatgtggccttttgtgtctggcttccttcactcagcctcatgttctcaaagtgcatccacgctgttgcatgtatcactgattcaatctttgcgtggttgcataatatttcattgtgtggtcggaccacattttgtttatccattcattcattgatccagtttgcattgtaacataaacttttgtattttgcatctagcctgtttgcagactggcaagaaagagagtgggagaggagtcacagcctcctagtttagtttgttggggaacttccataaactaaataaagtagaagggctcctattggtgcagggaggagagctgccctggcagagaaattgggcagatctgactctgtggccactcagggaaggtgatgagagaagccatggctgatagcctaggtttttgctgttaggtttgggattggaggattggggttggggtcaaaaagaggaggagaccagcagagtcacgtagtggaagcatgctgggcccatagcctagaggtcagtggaccataaccattttctgctaagaagtttttgactgggcatggtggctcacacctataaatcccagcactttgggaagctgaggcaggctgatcacttgaactcagaagttcaagaccagcccgagcaacatggttaaaccccatctctactaaaaatacaaaaattagccaggtgtggtgatgcgggcctgtaatcccagctactcaggaggcggaggcaggagaattgcttgaacccaggaggcggaggttgcagtgagccgagatcatgccactgcattccagcagggacagagtgagactctgtctcaaagaaaaaaaaaaaaaaaagcggaattgtgatagagaaagagtaattcacacagagctggctctgcaggggactggagttttattattactcaaatcagtctccctgagcacttggggagcagagtttttaaggacaacttggtgggtggaggggaagccagtgagccagcagtgctgattggtcagagatgaaatcaaagctgtcttcttgcggagagtcagttcctgggtgggggccacaagatcagttgagccagtttatcgacctgggtggtgccagctgatccatcaagtgcaggatctgcaaaatatctcaagcactgatcttgggagcaatttagggagggtcagaatcttgtagcctccagctgcatgactcctaaaccataatttctaatcttgtggctaatgttagttctacaaaggcaatctaatccccagacaagaaggaggtctgctttgggaaagggctgttatcgtccttgttccaaactataaactataaactataaactaaatttcccccaaagttagttcaccctatgtcctggaatgaacaaggacagcttggaggttagaagcaagatggagttggttaagttagatctctttcgctgtctcagtcataattttgcaaaggtggtttcaattttccaggggagcaatgaggctcagagaggggaagcaacctgccctgcatctcacagctagaaagcagtggtgccgagaattaaacagagtctggacgtttccatgacatagggaagagatgacttccagctgaaggtggcaatcagggagcagcttgctcataaaattcaggtaggatttggacccataaagatagggaaaagcatgaaaagaccagcatgaacaaaggcagaaaagcaaggtgtaggtggtggtgcatggatctaataatcgtgatggcaataacaatagcagaataattattactatcaacatttataatttattaaattcttactttgtgtcaggacctgcacaaagcacttaaggtgagtgatcttatttaaacctcaatacattattattaatgcctttctgcagatggagtaaccatggcttggacagatgaaggaggcgctctcagatgtcctcccaggcaggaatcactagacacccccatgctcctaaccactgggtcttctttcctctcttccccaactaggggtggccgtcatgctggggctaaaccacacctccatgtctgaattcatcctcgtcggcttctctgccttcccccacctccaactgatgctcttcctgctgttcctgctgatgtacctgttcacgctgctgggcaacctgctcatcatggccaccgtctggagcgagcgcagcctccacacgcccatgtacctcttcctgtgcgtcctctcagtctccgagatcctctacaccgtggccatcatcccgcgcatgctggccgacctgctgtccacccagcgctccatcgccttcctggcctgtgccagtcagatgttcttctccttcagcttcggcttcacccactccttcctgctcaccgtcatgggctacgaccgctacgtggccatctgccaccccctgcgctacaacgtgctcatgagcccacggggctgcgcctgcctggtgggctgctcctgggctggtggctcggtcatggggatggtggtgacctcggccattttccaactgactttctgtggatcccatgagatccagcattttttatgtcatgtgccacctctgttgaagttggcctgtggaaataatgtaccagctgtggccctgggcgtgggcttggtatgtatcatggcactgctgggctgttttctcctcatcctcctctcctatgccttcatcgtggccgacatcttgaagatcccttctgctgaaggtcggaacaaggccttctccacctgtgcctctcaccttattgtggtcattgtgcactatggctttgcctctgtcatctacctcaagcccaaaggtccccactctcaggagggtgacaccctgatggccaccacctacgcagtcctcacgcccttcctcagccccatcatcttcagcctcaggaacaaagaactgaaggttgccatgaagaggaccttcctcagcacactctattcctcaggcacctgagtagctggtgtggaagtgctgatagaatatgataggaggatgaccatcaccttgtctgcacagtgtggctagtaatgcttaccttgtaaggcaggtgtaaagatttctgtatatgacaacactcatcacatagtaggtgctcagtaaatgttaaaagcatgtttacttccacaactcttgatctgtatgtctttatctgagttttaatttttgagttatagtagctttattaagatgtaattcacctaccatacaatgtacccattagagcgcacatttctgtggtttttgcgtattcagagttatgcaaccatcatgacaatctggcttagagtattttagtcatccaaaaaagaaacccaaatcctagtgctttggaaggctgagtgggagaattgtttgatgtcaggaattcacgatcggtctggacaacatagtgagatgccatctacacacacacacaaacacatacacacacacaagttcttttttttttaatttattacactttaagttttagggtacatatgcactacgtacaggttagttacatacatatacatgtgccatgttggtgtgctgcacccattaacttgtcatttaacattaggtatatctcctaatgctatccctccccactccccctaccccacaacaggccccagtctgtgatgttccccttcctgacacacacaaaaattctgataattagctaaatggggtggcacattcctgtagccccagctactccagaggctgatgtgggaggattgcttgcatccaggagttcgaggctgcagtgagccatgatcaccactgaactctgacttgggcaacagagccaaaccttgtctcaaacaaacaaacaacccatactcattatcagtcactctctgtttcctccaaatctccatgccctccagccctagggagccactaatctttctgtctggttagagttgctttttctggacgtttcacatcaatggacaactgtaaatataattcttttattttcagatgaattgtttcactgagcataatgtttttgaagttctcctacattgtagcttgtatcagtacatcatcttttttttttttcaagacagagtctcaccctgtcacctaggctggagtgcagtggcatgatcttggctcactgcaaccttcgcatcccaggttcaagtgattctcttgcctcagccttccaaatagctgggattacagatgcctgccaccatgcctggctaatttttgtatttcagtagagacggggtttcaccatgttggccaggctggtcttgaacacctgacctcaaacactccacccacctcggcctcctaaagtgctgggatttcaggcatgaaccaccgtgcccagccagtatatcattttgattgccaaataatattccattgtatggaaacactacattttatttacccatttgtcattgatggacatttcagtgtttctaatttttgctattttgagtaatactgctatgagtgatcagtacaagtgttgcaatatatgctttcatttccttgggatatatacctaggagtgaaattgctgggtcaagtggtatttctatgtttatttttttaggaacttccaagctgtttcctaaagtctatgcaccattttacattcccaccagcaatgctgcaggggtctaggtctctgcaacctcaccaatacttgttactgtctttttgatcacagccatcttcgtgggtgtgaagtggtatctcattgtggttttgatctgcatttccctagtgagtaaggatgttgaacatctcatcatgtgcttattggctatttagatatgttcttggagaaatagctattgagatactccacccattttccaattgggttgtttgtatttttgttgttaagttgtaagaatgctttatatttttagttaagactcttttatctgatctgtgattttcagttatttccttatagtttgtgggttgtgttttcatggtctttttggtgtctttctgtagcacaatagatttacattttgataacatcagtgtacctatttttttttgttgttgcttgtgcttttggtgtcacatctaaaaaaacattgtattgctttatctaaggtcatgaacatctacgttgcctcataagagttttgtagttttagctcttacatttgggtttttgatatattttgagtgtcaaactttgtgtatggtgtgaggtaggggcctaatcttagttttggctgggttcagtgtggttgaatgaatcctgtctgtgaacttccatcagtgacctatgtctgtgattatataagtttgtgaggatgaggaaataatcatcacacacacacatggccctaggcagacacatcattcatactgaattagtaaacacacttcattcccagctactaggttgcttcccatgctgttgcacagcaatagtaaaataataatggtagccactgtatgagtgtctactgtatgttgagctgtatactatgtccagcacccttcatagatcatctcttcatttctaaaactgtgtaacaggtaaaaagacaagtgtgccagcaaaaattgcttattatttttaatttctcaaaggttttgagggagattgagttctagaaagagatttctctatacaagctgtggaaagtgggcatggtggctcatgcctgcaatcttagctacttgggaggcttaggtggaaggttaacttaagtccaggagtttgagaccagccttggcaacacagggaaaccccaattttacaaaaaaaaaaatacaaaatattagctgggcatgtttgcactagcctctagtcccagatactcaggaggctgaggcaggaggatcacttgagcccaggagattgaggctgcagtgagctgtgatcacattactgcaatccaacctgggtgacagaatgagaccctgtctcagaaaaaaaaaaaaaaaaaaaagactgcctcgagcctagtttgctatatactacttgtacttgctgacaaattggattgtgcatctaattttatggctttgtgaacagaacgtgcctagtccaggataagcatattgggttgtgtccttaatggggctcagaagtgagtgaagccttattgtcccaggaaagaatagtgatttcttgctctaacatattaaacatttccactgtggatctcctattgagctctgcaaggttttacacaacatcctcattttccagttgctcagagcaccattaggtctgttggattttgagaaataaaaataaaatcctaaggcccccaaccaactgaacagacaccctcttgaacataagaaccccagagaaatcttaaaaaccgtgttcccagctgtgatggaaggagaggttggctatccctcagtatggcccttccttatcaatctttaaccagaattctccatccctgtctcctttgagactggaatcttcccatcctttgcatgagctaaaatctccctgggcagagaggtagcagtgagccctgtgtgctggaggaagaggtggaggctgcaggttcctgaatgctccctgaggctcttcctggcctctccagacccagaggacagcctttccagcgtggtttcctgtagaggcccatgggaatgacctgctgggaaggtcactgcaggaataaagctcacagcaccagttcaaggaggccctgggtctggctcctacacttgcctgcaggtgtcctgtgaaaacacctaaaaagggtgttttttgtgccttttccttagagccacttcattgaaggcagccccaggtggaggtggaccaagaggaggagggtataagggcagagtcagagagctgtggatggagctgcccagcctagagttggggtgcagaactggggagacgaggaaaagagagagatctcaactttagttgacttcctggggccttctgtgtttgcccactcaagatgcctggttgtttagtgagcccaggcactcatatcagttctcaactggacgtgattctggccctcaggggtcaattggtcgtgcctggagacggtttggttgtcaggacttgtgtatgggggttggggggattttcctactagcatctaagagattgaggccaagcatgccactaaatgtcagacaatgcataggacagctcccagcacaaagaatgatccgtcccaaacctcactagtgctgagactgagaaacgctgttctaggtatattttgtcttcactgttgtgcccctgctaacctgggggcaaggctctgtgggagggcaggatgcactccagtgctgtgagatgtttgctcagcctgtatgtatgagccatctgcaatgataccagagtaggcagaattctgtccacttgtcagaggagatggggaagccgggccttgagagctgtggctgctccagtaagcaggaggtgggatgttggactgtaggggtgagacaggggcttgaggagagggggaaggttagatgagactcttggttggatcagacactgtgttgtgtcattgccagaaatcctaaggaccctgctggggtcagagaattagcctagaatggggtcagcaagtgacatttgtaacagaacaacacaaacaaaccagctcagaagaccaaaatcattatcagtcaatgacaatgacttttgcaaggtggactctcacagtgctctggttactcctgtttttcacttggggagagtagcctcgaagctgcaaagtcgtttctccaaagacacacagtgatggctggggtttccaccctgagtctgatgcctccacaacttgtaaacatttcaggaaattctctctggaagccagagtggagtgtgtgcagaggagaggagatgaggaggatggggcagtggcccaggagaggggatggagaggaagggagcagatggagaagtgcttagtaggagagagggcgcccagcaatgggagggatggggaaggaagatggctgatgctggagtatggtttctgggtagggcagcttcgtggtcagaagactttccttccgtgtcataagtgtggtcttttcatgtgggatacgtcatcctcactccagtaaagttcctcactgtccgggtgattctgtgttctccaagcgcctgactgactcctgctttggtcaggggatacttcagacaatatcctagtgagactgctagggggatgtaatgatgaatgggcccatccagaaagaaagatttcagaaactcttgtagcaatgtggctcacattattcataaaaatatttgtttcttttatggtagaattcaggtgcaaaggtttgagtccatgatattttcagtttgtggcttttgattaacattgatttgcgaaagatccttctcttatttcatttgtttcactttgtttccgttctttgacaggcattttcacacacttagtatgcactttttgatttgtatatgttcttgtaagaaacacattgctttctgtctgcacaaaatttaatgtgactattttaaaatggtaaattaatggacttaattttattagagcagttttaactttatagaaatattgatcagaaagtatagagagttctcacatacgcttcacccctgcatgtgggattgtctctcctattattgacatcttgcatttctgtatcacctgtgttacactcgatgaaccaatattgatgcattgttattaactaaatttcatagtttgtattaggttatgctctttgcattgtgtatatggattttgacaaatgacatgggttcattattactatatcattcagaatagttttatgtacatatattcttaatgtgtccacaagagttcattctgtttttttgtttttttcactcaatattattttaaaagttcatttatattactatgtgtgcatctaactcgtgacaaaagctctatatccttttgcctctatatccgttgtttgcctctatatacttttacctgccttctccccagttagggacaagcaggcttatccatcacccccactaaaataactgctgcaggaaacattcttttacatgtccccctataaacaggtttcagaagtcaagatagatatacagtagcaaatttgctggtacacagagcatgaatcccattaaaaattttaatttccaacattctacatgcccactaatagtatgtaagtatttccccttccccttcccctccttctccttctccttctgcttcttcttcttcctcttcctcttcctctgatggagtcttactctgtggcccaggctggagtgcagtggcggcatctcagctcactgaaacttccacctccaggggttcaagtgattgttatgccttagcttcccaagtagctgggattacagatgtgtacctccagcctggctgatttctgtctttttggtagagacagggttttgccatgttggcatagctggttttaaactcctggcctcatgtgatcctcctccctcggcctcccaaagtgctggggttataggcgtgagcctccgcgcccagcctatagtgcgtaaatatttctttctcctcatagcccaaccaatactggacattttataattttgggaattgcataggtatacagtgaaattccactctctctttcattttccccttccctccattcttttcctttttgttttctttttcttttttcttttttttcgagcatcctttcatctgcctgagtaattcctgtgcattatcttctcacatcttttgctcgtttttgcattaagatacctacttcttcttgatataactggttccttgtttgttctagatataactctcttgtcagtttttaagaaattccccacaccactggatgtgctcctgtcggttttagacaatgcaaataatttttccccatttcccatctgcctgttaacttcatcctggaaatcctttgttgaatggaaatcctcaatgttgatttttttaatgttttaaaaatcatcttaatgattgtgctttggaaattttgtttaggaagtctttcctcaagcctagatcacaaagttattctcctatactttcttctcttaaatttacaccttgatatttggtatttatttcttgaatgcatctggatcctcctttgtatgtagagtttggcagaaattcggattgacttgcttcataaaatgagcagttttctcactacaatgggtgaacaacctaccttctcctcttgatttgtgccagtacatttatcgtgtactatattaggttttgaataatgcagggttattttctgagatttccaatcgacttacccagacctaggtctgttccacgtttcataattttaaaaatgactatgactctattgtgtgtctcagcgcgtgggagggaacagctcttcccttgattccatatttatttatttatttatttatttattttagacagagtctcactctgtcacccaggcagcacactgcaacctccgcctcccaggttcaagcaattcttgtgcctcagcctcccaagtggctgggattacaagtgggccatcacacctggctaatttttgtatatttagtagagacgggctttcgccatgttgctccggctggtcttgaattcctgacctcaagtgttctgcccagctcggcctcccaaagttctgaaattacaggtgtgagccaccgtgcctggcctgatatttatttttctgaaggaattttcaaatagttttatcaaatttacagttgattcactggaattgtaaatataatacaatattatattattgagtattattaagtattgaggttataatttgaggatgaattgacaccattagcacatcaggccatcccagccaagactctatactgctccccatgtgttcagatcatcttctacatttttattagtatgtatttaaaattttttctttggagctatgtcatgtttttggttaattcctagatattttatagcagattttttcaaagtgtgacatgaggacctctgcagagtggtccctgaaatccttatttttcaaatttacatgtgagaatatattttcatcatatgcttcaatatattgccacagactgaatgaagaggcagatgaaaccatcaagctgtttcctgccaagctaggacatatgaggtattggctaaaatgtcaaacaaggccactcttctcatgaaatgcttttttcctaatgtgattatttgcctgaaaatgtttcccatattagcattcaatagacttactattgctctttagaaatttttttttgagacgaagtctcactctgttgcccaggctggagtgcggtggcatgatctcggctcactgcaatctccgcctcccgggttcaagtgattctctggctcagcctcccaagtggatgggattacaggcgcgtgcccccatgcccagctaatttttgtattttttgtagagacctggtttcaccatgttggccaggctggtctcaaactcctgacctcaagtgatccacaaacttcggcctcccaaggtgctgggattacaggcgtgagccaccgtgcctgggcatgcttttttaaatatactaataactaaatatttttaataattttcaattttcatttccaatatggtaaaaatggatagttctaaaccacataaacaaaagccctttagagtgcttagtaactttgaggtgtaaagggatcctgagcgatgtttctttatattaatagtttgtgttgctattgggactgttctctttctctgtattcagattatacttcttgaatgcttgttactggtgtgatactaggaggatcactggggtttttgccagctgaccttgccttctgcatcactgggctctgttgctgttctaatacatgatgtcatcattctttcatcttttctaggtagatgatcacgtctcttcccttccagtccttagataccttagataacttgtttctttcccttaccttataccatcactcacgaatttcagctccatgttaaagaacagcggaattagtgagtatccttggctttttcttgactctaaagtgatgcatggaaaagtttcttcttcagtgttgtatttgctaatttgtgctatatattctatatctagttaagaaagtctccttggattttgtgttgtgaagtgtttttttttaaatcataataggagtagggttttagagaatgtatttatgccttgattgaaataatcatgatttttctttttaaatcgattcctgtgataaattgtatgataggttttctgatgttaaccaatcttgtcatttatggaataaaccaatgccacttgatcatggtaaactatttttaatacaccattagatttgaataggttatgttttattctggaattttaaatctgcctggataggtgaagtaggcctataattgtctctttttctcggtgaagattcttgcctgattttagacaaagattgcattaacttgaggagatgtgtttgtcagatttcctaactcttttctatttttttgaagatcatgtgtaagattctaaccaactgtttttttttttaacagtttaatagtacttaccgcactttaataaaacccactggggcaaagattttagagagacgatctttgactaccgtttcaatttctttaaagcttatttgagcatatagcatccccttttttcttgcaccagttttggaattttatatttttctaagtacttgttcatttcatctacaatgtaaatttgttatttcttttactatttttattaatttaaaaatatcaattatctctgtaattatttcccatttgtaattttgggttctgttattggtaccttctccttgtttatcttattaattttttccaataacttgattttgattttattatgcatgatttttttcttgaggcagttttttgataaaggtattttgagctgtatatttccttcaaagtactattttaggttaaaatgttgacattcaatatttaaattatcatttaattctaaatattcctccattttatgatttactgttgaaactgtagattatttaattatatagttatcttccaaacacatgagatttgtaaagctatttcttccctattgatttttaatgttaattcattataatctatatcatattattatgctttggaattaaataaatttttatattctaatgaaatgtccatttttgtaaaagtcgctgagtggttgaaagagtgttaattttctttttggtgaagagtctaatatatataatagctaatgtctggatattattaattgctttgtaattaataattaataaattgcatttctgaactctgttaaaatttctaactataataatctatctgccaggtgtggtggctcacacctgtaatcccagcactttgggaggctgaggtgggcggatcacctgaggtcagaagtttgagaccagcctggccaacatggtgaaaccctgcctctactaaaaatacaaaaattagccaggcgtggtggcacgcgcctgtaatcccagctattagggaggctgaggcaggagaatcagttgaacctgggaaggggaggttgcagtgagccgagattgaaccattgcactccagcctgggtgacagagcaagactccgtctcaaaaaaaaaataatcaatctgccgtcgatttggctatttctatctatctcactgaagttgtattgattatttgttaatgaatattccaggatatatagttacatggatttatagtattgatgctgtttgctatgttcttttaatgggtataaatgttattctctgtcccttagtgtgtgtgcatgtgtgtgtgtgtgagatgtaaaaatcttggtatgcattgaaaaactaaacatttaccttcatagtcaaaataaccagataacacttacaaaaataattagctgagcatggtggctcatgtgtataatcccaccactttgggaggctgagacaggaagattgcttgaggccaggaattagagaccagtttgggcaacaaagcaaagccctgtctctacaaaaaaaaaaaaaaaatgtttaattagacaggtgaggtggcacacatctgtagtccagctatttaggagactgagaagaagcataacttgagcccaggagttccaggatgcagtgagtcatgatcctactactgcactgtaacctagggggcagagtgagaccttgtctctaaaaaattcacaattagatcaataataatgctttaatattactcatacgtaatcattcattcatactgtaatcaaaatgttctctattgccttaaaatacttacagctggttatgtagatcaagattcaactagtcccctatgttgcatccagttactatgtcctggaatctctcttatcctttcaatatacctctatcagtgaaaccagaccaattgttctgtggaattatccaccttctggatttttctgaaagctttctcattatataatttagcttgttcctccatcttctgtacaatgattattgtttttgactagtgggcatcttttcaatctggtacctgcaggcttttaatattatcccattacttagtgaaaatttcattttacactggtagaagatgtccaaggctttcttccatgtccagaccacagatcagccatgtgttaaggaactctacttccctgtagaggtgtattgtattagagaccttgcgatcattgtttccttaaattccacttttttattaaggttgcagcctcagctttcatttggtgcatattcttcagacatatatttacccatccttttatttttgaattttctattcagatttattagaatagtaaatgtgtaatttgaaataagatggcataaatgagtatcaataaatgagtattaaaataaatgtaaacgggttaaataagcaattaaaagacaaagactcttggggaacaaaaatttaaggctcaagatcaaaataaatgttttctagaactggcacattttcaggggaatctgaccctgatcatccatgcctgtctctaatggctccaagtattgaaacttttctttatgttagtcagtgttaatggaaacccaattagtagccaacatctgacttggtcatctaatatattgatctcgtttgatctttgtcacattgctgaatgttaagaactattattatttactccatttaacagatgaggaaagtgagacccagaaagttccaccagttgttgaatagcatagagctgttgggtttccatttggtctgtgctagagtctaagttttaaccactgtcacttaattttgtttctgatctcaccagatacagtatccatgcctggtcagaactacagaaccatatctgaatttatcctctctggcttctcagccttcccccagcagctcctgcctgtcttgttcctgctgtacctcctgatgttcctgttcacattgcttggcaaccttcttatcatggccacagtttggattgaacgcagactccacacacccatgtacctcttcttgtgtgccctctccatctctgagattctgttcactgttgccatcacccctcgcatgctggctgatctgctcttcacccatcgttccatcacctttgtggcttgtgccattcagatgttcttctccttcatgtttggcttcactcactccttccttctcatggtcatgggctatgatcactacgtgaccatctgccacccactgcattacaacatgctaatgagtccccgtggctgtgcccatcttgtggcctggacctgggctggtggctcggtcatggggatgatggtgacaatgatggtttttcacctcactttctgtgggtctaatgtgatccaccattttctctgtcatgtgctttccctcttgaagttggcctgtgggagcaagacatcatctgtcatcatgggtgtgatgctggtgtgtgtcacagccctgataggctgtttgttcctcatcatcctctcctttgtcttcattgtggctgccatcttgaggattccttctgctgagggccggcacaagactttctccacttgtgtatcccacctcactgtggtggtcatgcactatagttttgcctcccttatctacctcaaacccaagggcctccattctatgtacagtgatgccttgatggccaccacctatactgtcttcacccccttcctcagcccaatcattttcagtctaaggaacaaggagctgaagaatgccataaataaaaacttttgcagaaggttctgccctctaagctcctaatggccagtttggtggtgataaaatataatagaagggctggggataataatgtgtatctccataggactgttgtaagggttcaggtatgtgaaaatacctgaaaatatgtgttttgtacctactagctattgttttccccttcctttttgcttaggctcatgtgatcatttatgagccattgtaacgaactttatcccattatctgtgcctagaaatgtgttttctatctgtggataggtggagatcatcacgtggatgtgtctgggcatttatgcacatggttcttcttaaacagacaggcaaaaaagattttattttcccctagtgtaagaaaaagcaagaataacatcatagtcataaatgccaccaagcattgaagtttttctatgtatcctgtactgtgtccagtgttttacaaatattatccttttaattagaagaaatgaacaaaggaaaataaactatttgtctcagagaaactggtttctgtttttgttttgatggagtcttgctctgtcaccaggctggagtgcaatggcacaatcttggctcactgcaacctccccatcccgggttcaagtgattctcctgcctcagcctcgcgagtagctgggaccacaggcgcgtgccaccaggcccagctaatttttgtatttttagtagagatgggttttcaccatgttggccaggatggcctggatctcttgacctctttatctgctggccttggtctcccagagtgctgggattacaggcatgaaccattgcacccagccactgaaactggtttcttatttaaagttcctcactgtctttgggagacatataccctaagtgtgtgtgtggatattatgtcgaattgagtgaaggatatcagaatgcaaaagtggagagagagcaagaaggagagagagagagagagatacagagataggagaaagagagagagagaaagagagagagagaaagcaggtgtcaagtagtcaagtaaaaatagagttctttacattttttgatctgtacaagaaatgtaataactaagaatttggggcaaaatctgggaaagggaaaaagagagaaaaaaaggaggttggtaaaatagggctttaatatgtcctaataatagggctgtaatatgtcctaataagacaggcacgtgtctcatccaagcgtttttgacacagttgctctgcagtctcaatgggtcattctaggatatgtactcccttgtctccaatggatgcatcagttttctggttttctggttctggtcattggtttcaccagctgaggaatgaatattattttcacagtgcggctactcttctaatgctactcagagagtcctcacctgtgcttcctgctggtgctggaatgtgaaggtcaacattgaaagagatttcattctagaaaagcagagatcatggccttaaaaggtcaaaaggtgatatggttggaagaggttttattgtatgtttatgctataaaattccaaacaaagcaagcttttcttggcattatcctgcatactctgggcaagacttgcatatgtggttatcatcagtgaagcaccatagcaaccagtgagagagcctctgggaatatggtcacagatgataaagcgacatgagtgatgatggaaagggcattaagtaaacactatgcacgtgctacagaggtggaactttctatacaaataaatcagaaatttttccaagagccaaggtattgtgagtattaaccactttgctacctctttcttccgctttcttttgaatagttttagtatggtatatatttctccattcatttactttttaatttatatatgtctttatatttacagtgattttcttgttagaaaacactttatccgcagtttgggaggccgaggcagaagatcacgaggtcaggagattgagaccatcctggctaacatggtgaaaccccgtctctactaaaaacacacacaaaaatgagctgggcgtggtggcgggcacctgtagtcccagctactagggaggctgaggcaggagaatggcatgaacccgggaggtggagcttgcagtgagccgagattgcgccactgcactccagcctgggcaacagagcgagactctgtctaaaaaaaaaaaaaaaaagaaaaaaaagaaaacactttatccaggtcttattttttaatcctttctaatgatctctgtattttaattcatgcattaaaaatactgatgttcaaagtaatttatgatacactgatattaatataaaccaaatttgttacggttttttgtttgttgcttttgttctttatttctatttttgtctttcattctttttatgcctttggtgcttttaagtaagcattttatatacttccatgttctcttatttcttggcatatcaattctactttaaaaatatttttagtagttttcttagagttttgaaatatacatttataactaatccaaatccatttcaaataacattatatgatttcacaggtagtgcaagtatcttctaataataacacaattctgatgtcttctttctatcccgtttattattgttgtcactatatcatatattcataaaaatgtatataacatatgtataacatacacatgtgcacagatggtaaaatgctttgtttatcttattattttaaactgtaatctgttagatcaattaagaataagaaaaatgaatgcttttatttatctccatttattccttccctgatgctcttcctttctttaggtagacacagatttctgacctatataattttcattctctttgaagaacctccttaaacaattcttgcaaagcaagtctactgataacaaatgcttttaacttttatctgagtcagtctttatttctcctccacttttgaaggatactttcatagggtgcagaattctaggttggtgaatttttttctctcaacactttaaatatttcacttcattctcctctttcttgtatgggctgaagagaaattggatgtaattttaatctttactcctctataggtaaggctctcccttcagcttttataaggatttttttctttatatatatatttttaaaatttttaagttccaggatgcatgttccgggtgtgcagtttgtaacataggtcaacgtgtgtcatggtgattttccgcacctatcaacgcagcacctaggtattaagcccagcgtgcattaactatttttcctaacgctccctcactccccagcccaccccgtgacagaccccagtgtgtatttttctcctgccttgtccgtgtgttctcattgtatatttgattttctgtagtttgaaaataatatgcctacgtgtactttttctggcatttatcatactcggagtggtctgagcttctaggatctgagatttaatttctgatatcaatttggagaaattctcggtaattattgtttcaattttttcatttgtctttcttctcttgctggtatttccatgacacctatgttaacattttgtagttgtcccagttggatattctcttctgcttgtttccctccactcttttttctctttgcttttcaattttgcaggatcctatgatatatcctcaagctcagagattcttccctcagccatgtccagtctactagtaagcccatgaaaagtattcttcgtttcatcttcctcctacccctctccctcccctccccttcctcctccacgtcctcctctctttcttctccttctccctttcttctcctcctcctccttttcttctgattattttttaaaatagggacagagtctcactctatcacccagcctggactacagtggtgcaatcacagctcactgcagccttgaatttctgggctcgagcgatccactggccttagcctcccaagttgttgggattgcaggtgtgcaccaccgcatctgaacaatttttttttttttggtacagatggggtcctgatattttgacccagttggtctcaaactcctggacttaagcaatcctcccacctcaatctccccaggcactgagatgacaggtgtgggccaccagtccattccttatttctgttacaatcgatttgacttttagcatttcttttgtctctttcctagaattatcatctcagctgacattgcttatctgtgtttccttgctgtctattttgtctactagaacccttggcacattaatcatagttgttttaaattcccagtctgattattttgacatgcccaccttatctgggtctgtttgtgatgccttctctctctcttcaaacagtcttttagtatgccttgtaatttttttcttgatacccagacatgaagtacttgggtaaaagaactgttttaaataagcctttagcaatatggcagtaaggtatggggaggggaatcattctatagacctatgcttagatatcagcccccatcagcagatgtgctaatcaggatcccctgacaccacctcccttaggtggaacaggatgactagagctggcaagagttgggtattttctttttccagtgaaactgtaataaaactccagtaggttaggttctggttcaattgtttctcctcatttggagtctttcattgttctctcctgcctgattgctctggctaggtcttctagtactatgttcaatagcagtggtgagagtgggcatccttgtgtggttccacttcttaaagggaatgcttctagcttttgcccattcagtatgatgttggctgtgggtttgtcgtagatggttactattttgaagtatgttccttcaatgccaaatttgttgagggtttatgacatgaagggatgttgaattttattgaaagcccgttctgtgcctattgagatgtggtttttgttttaaattctgtttatcaactcatcatctaggttttaagccccacatgcattaggtatttgtccttatgctctccctcaccctttcccccacccaccaacaggccctggtgtgtgatgttcccctccctgtgtcaagccaccatggcacatgtatacctatgtaacaaatgtgcacgttcagcacatgtatcccagaacttaaagtaagaaaaaaagttctcatctttcttttcttatataaaagatagatacaatgatactggtgagaattaaataaatttatacatgtaaaacacctcacctagaacataacacccaaacacaggctacataaattaatgtttgtccataaaaaatgcataaaaaattccgtttatgtgctgaatcacatgtactgatttgcatatgttgaaaagaatgaagtcatgtcctttgcagcaacatggaggcagctggaggccatcgtcctaagcaaactaatgcgggaacagaaaaaccaaatgctacatgatcttactggtaagtgggagttaggcactgactacacatggacacaaagatagcaacaacacacactagaaactattcggtgggggagggagggagaggggcgtgggtggaaaaactacctatcagctactacgcttactacctgtgtgatggcaccatttgtacaccaaacgtcagcaacatgcaatttacccatgtaacaagcctgcacatgcacctcctgaatctaaaataaaagttgaaaagaggaaaattgttcctcctgagggtagatcttcataggaagaacagaatactctggcgtatttcaaaatgggtcattgttcctcctcccctaacagaagtatgaggggtcttttctcctgcttttacaatgaggacttgacagacctcttagaggtaaaaccaacaaaagtgtgggaaccccctccaataactgggtccccaggagttttgacctctcagatttgtctataccaagccttcagtaattcttcaattacagtaaacatttcccttctctgatattggttcctccagaggttgcaatggatggatttcttttacaataagttgtgattccctctacttgcctgttggtctttccaatttggggagctgcagtttgccctgtgacatcttttaccaatcaagactgctgagttttcagtttattcagctttttacttattgtcgggatccagcagcaactttcagcttcttacatgccagatcagaaactggaagtcaaatataagttcattttttatataactaccatatcaacttaagttttgtttataacttactaaaaagaacaagtgccttagtttgtcctgacatccaataaatgctctaatatcgggattacttaaagagcatttttctaatcagaatgcaaacaagaactacatgttaattcagttatgtcttttagggacttttattctataatcctcattctccttcaatttttgacatttgtttttgagatagtctagattattattttcttatagaaagtcatacaagctatattagcacgttgtttcatgacagcgtcatttcacacgttcgcagtagaatttaagagtggaaggagaagacagagatgctaacaagagaacttggacttatctctttctggagagaagtcagggaattgtcatgagatcacaaatcaagacagatgggctgggtgtggtagctcatgcctctagtcctagcatttcaggagtccaaggagggaggatcatttgagaccaggagttcaagactagcctttgcaatatagcaagatctcatctgtacaaaaattttttgaaaatttaattggaggtaatgaattccccttcacccccactatgaacatacccttacccctagagttttctgatttactctttggcccattgagcatgaattttctgatactgcatccccttccgataagggagaagaaattattactcccacctctcctctcctcctcctgcctggactctgtattctgggttaaactatgatttattttaaggatttataacgcctgacacatgtagctgagccttctgcacagagaaatattgggagtggaggctaattgggtcaaaggaaagagccttaaacctacactacagcctatcagggtgaatcagaggtctacattgccctactcttgtctcacctactgccacaatctaggtgaaggtttggaccatagaacgaggaacttgtgtggagacttttagccccatagatgccctcagaccagtctgcaggacactctgccctgacctgccccagctttgcacacatattctccagtccttgaaaggaaactgcccccttcaaagcttacaagtttctcctcctggctcagcacggggagcaagttctctagatagcttcttgttaaataaaatggtagggaagaaaacccaggcagctgagcatagaaggggatgagcaacaagcttcctctccaaacatgattttccgtccaaggtcatgagcactccctggtctgcttacatttaccttatgctagatttctggtcagcacaacagcatgcaaagcttcagcagcttccttctagatggagctgtggtggttcctgtttaggcagttgtgctcgagaatcttctcctccaggactactgggcaaggtccagtgcaaaggagttccccaacacttttatctactttcatttgaatttttaaattaaacattgaactcagcacaaagagaggcgaggatcatgattattgggtagattctacttccaaatattgtaattgcaattccttgtgtaattattatagcactagggctaccagagctttaaaatctgttctcaagattctgaaggtagtaagtggtttggctggcatttgacatatattttcaatgagtttaaaattagttttcttgcctgtataccactctgcctgactaaccttaaaataatctctttaaaatatctgtgatatttacctaactacatttttataatgtcattcaatactatacttattgcataaatattttacgtacttatcatgtaagtatacaaaatagcacatatagatcttatgtttctccatgaagtttttaattgtatcagctacataattttttaaatttttttattttaagttctgggatacatgtgcaggatgtgcaggtttgttacataggtatacatgtgccatggtgatttgctgcacctatcaatccatcatctaggttttaagccctgcatgcattaggtatttatcctaatgctctccttccccttccccaccaccccccggcaggccctcgtgtgtgatgttcccctccctgtatccatgtgttctcattgttcaactcccacttatgagtgagaacatgcggtgtttggttttctgttcctgtgttagtttgtatcaggtacataatgtttaatcatagttatatactatcattcattcacctttgatctacccaaaactatgagaaggggaaagaaaagaatgaaaggaaagtgcgatcaatctgaataggcctgtatcgattagagcaattgaattaataattaatatcatttaaaaacagaaagcctcagacccagactggttcactgatgatttctaccaaatatttaaggaagaaattcttaccaattttctgctttatcttttaaaagacagaagcaggggaaatatttcctaactcattttatgagaccatcattaccctaatagcaaacctagacaaagacattaccagcaaaaaaaaaaaaaaaaaaaagaaaagagaagaagaaaataaaagaaaaaaattaggaagaaagggagaggtaaaactatacagattaaaatctaccttggacatacatgcaaaattcccagcaaaatattagcaaattgaatccaacaatatataaaaataattatacattataaccaaatgggattcattgcaggtatgcaaggctggttcaatatttgaaaatcaaataatgtaaaccatcacattagcaagctaaagaagaaaaatcacatgattatatcaatagatgcaaaaaagcatgtgacgaaatcccacacccattcataattaaaaattatcagtaaggtggaagtggagagaatgccttcaacttagtaaagaatatcttcaaaaacctacagatagcatcatacttaatggaaagaaacgacaagctttcccactaaggttagaaaccagactagaatttcccctcttgtcactacttttcaatattgcactggaagtactaaatgcaataagacaagagaaagaaataaaaaatacttggattgggcaggaagagataaaactgtttttgtttgcaaatgggatgatggtctatgtaaaaaatctaaaagaaccaacaaaaaccctcctggaactaataagacattatagcaagtttgaaggatacaatgttagtatataaaagtcaaacactacatagcagcagtaaacgtgaaattggaaattaaaaatgcaatactattgacattagtatccccataaaatgcttacatataaattttaaaaatgtacaagatttatatgtggaaaatcgcaaatttctaatgaaagaaatcaaagaattgaatgtagacatattccatgttcctgggtagaaaaactcagtatctattttttatatcgtttttctcttttttattgatacataataattgtacgtatctgtgggttacatgtgatatggtgatataaatatacaaagtgtaatggttgaatctgggtaatgggatatccttcccctcaaacatctgttatttctttatgttgggaatatttcattattgtcttctatctattttgaaatatacagtaagttattgttaaccatagtcaccctactgcactattgaacacagaactgatttcttctatctaactgtatttttgcaatcattaaccaactgatcttcattcaacttcaacctttccaagcctctggtaaccattattctactctttatctcttgagatcaacttttttggttcccacatgagtgagaacatgtcatacttgtttttctgtgcctggcttatttcactttacataattatgtgcatttctatccattttgctgcaaaggagaggatttcattctttgtaatggctatagactattctgctgtgtatttgtacattttctttgtccattcatctcttgatggacacttagactgattccatatcttggctattgtgaatagttttgctgtaaatgtgggtggggaggtggaaatatctctttgatatattgatttccattctttttaatatataccaagcaatgggattgttgaatcatattgtagatgcatttttagggttttttttttttttttgaggaacctccatactgttctgcatagcgattgtactaatttacactcccactggcaggatatgagtgttcccttctttctgcttctctgacagcatccattattttttctatttttaaatacatttttttatttcaatggcttttggggtaaaagtggattttggttacaaggatgaattctacagcgatgaagtctgagattttagtgcacccatcacctgtatagcatacactgcatccaatatatagttttttgtccttcaccaccattcccctcttctgagtctccaatgcctgttataccactgtgtatacctttgcatacctatagtttagctctcacttataagtgaggtcatacagtattgggttttccatttctgagttacttcacttagaataatgacctccagctccattcaagtttcattcttttttatgtttgagtagtattctgtgggagtatctataccacatttcctttatccactcatcaattaatgagcacttaggatggttccacatctttgcaattgtgaattgtgttataataaacatgtgcatgtgtctttttggtatagtgacttcttttcctctgggtagatacccagtagtgggattgctgaatcaaatggtagatccaccttcagtttttaaagaaatcgccatactgctttccatagaggttgtaatttacagtcccaccagcagagtaggagcattcgcttttcgtgacatccacaccaacatctattgttttctggctttttaattatgcccattctggcgggggtaaggtggtattttattgtggttttaatttgcatttcactgatgattaatggtattgaatattttttcatgtgtttgttgccatttgtataccttcttttcagtaatgtctattcatgtcctttgcccccttttggatgggatatttttttcttgctgatttgtttgagttccttgtagactctggatattagtccttcatcagatgcatggtttgcaaatatattctctcccattctgtgagttttctgtttaccctgctgattatttcttctgctgtgtagcagctttttagtttaattaggacctatttatttatttttggttttgttgcatttgcctttggaatggtagtcataaattatttgcctaggccaaagtccagaagtgttttcctaggtcttcttctagaatttttatggtttcaggccttataattgtctttgatccattttcagttgattattttacatggttagagaaatgaatccagtttcatttttctacgtgtggttatccagttttcccagcacgatttattgaatagggtatcctttccccagtttaggtttttgtatgctttgtcaaagatcgggtggttctaagtatatggctttatttctggagtctcctttttgttccgttggtctgtatatccacttttataccggtaccatactgttttggttactatagccttgcaatataatgtaaagtcaggtaatatgatgccttcaggtttgttctttttctcaggacttttttggttgtttgggctctttttttcttctgtataaattttaggattgctttttctagttctgtgaaaaataatgatggcattttgatgggcattggattgatctatagatggctttggacagtgtggtcattttcacaatattgattcttccaatccatgagtgtggaatctatttccatttgtttgtgtcatctgtgatgttctccagcagtattttgtagtactctgcttctagagctctttcaccttcttggttaagtatatttctcaacattttattttttgcagctactataaaagggattatgtcattgatttgattatcagtttggtttttgttggtgtatcccagtgctactgatttgtgtacattgattttgtaacctgagattttgctaaaataacttatcaaatctaggagtcttttggtggagttcttagagttttctaggtatacgatcatatcatcagcaaacagtgatagtttgactttctattttataatttggatgttctttatttctttctcttgcctgattgctgtagctgggacttccagtactatgtttttgtttttctggtggttgtttgtttgtttagacagagtctcgctctgtcacccaggctggagtgcagtggtgcaatcttggctcactgcaacctccacctgccatgttcaagcctcagcctcctgagcagctcggactacaggagcacaccaccaagtccggctaatttttgtattttcagtagagatgagctttcaccatgttggccgggctgatctcgaactcctgacctcgagtgatctgcctgcctcagcctcccaaagtgctggaattacaggtgtgagccactgcgcctggcccccagtactttgtcaaatggaagtggtgaaagtgggcatccttgtttcagttcttaggaggaatgctttcaagtttaccccattcaggatggtgttgtctgtgggtttgtcacataaggcttttattattttgaggtatactccttctatgcctagtttgttgaagatttttatcataaagggatgctggattttatagaatgctttttctgtgtctgttgagatgattatatggtttttgcttttaattctgtttatgtggttaatgacatttattgacttgcatatgttgaacatccctgcatttcagggatgaaacccacgtgacaatggtatataatccttctgatgtgctgttggatttggttagctaatattttgttgaggatctttgcatctatgttcattaaggatattggtctgtagttttcttattttgttatgtcctttcctggttttgttatcagagtgacactgaattaataaaataagttagaaaatattccctctttattaatcttttggactagtttcagtaggattggtactaattcttttttgagtgtctggtagaatttgactgtgaattcatctggctttggggtttttagttgtttttggcaattcgttagttactgactcaatctcacggcttgttattggtttgtttgggatttctatttcttcctatttcaagctaggggagttttgtttccaggaatttacccatttcctctaacttttctagtttgtatgcatagaggagttcatattagttttgagtaatcttatatttctgtggtgtcagttgcaatgcctccatttttatttctaatcaagctaatttgaatcttctctcttcttttcttggttaatctagctaatgatctatcaattttatttatcttttcaaagaacaaactttttgtttcactaatcttttgtgtattttaattcaatttcatttagttctgctctgctttttgccatttcttttcttctgctagctttgggtttggtttgttcttgtttctctagtttcttcaggtgtgacctttaattgccaacttctgatctttcagactttttgatataggcatttagcatgataacccttcctcttagcactgttttgcagtatcccagaggtttggataacctgtgtcactattatcactcatttcaaagaatttttaaaattttcatcttgatttcattgttaactcaaacatcattcaggagcagattgtttaattttcgtgtatttgtatagctttgagagttccttgtggagttgatttctagtttcatttcactgtagtctgagaagatacttgatatgacttggatttttaaaaacttattgtggtttatcatatggtctatcttggagaatattccatgtgttgatgaaaaaatgtatattctgcagttcttgcatagaatattctgtgaatatctgttaagtcctttgttatggagtgcagtttaagtccagtgtttctttgctaactttctgccttgatgatctgtccatgagtgttaaaatcccccagtattattgtgctgctgtttatctcttttcgtagttccagtagtaattgttatatgaatctgggagttccatagtcaggtgcatatatatttagggttgtaatatctcctctttgaagatcaatcttgttgattcatcattttatcattatatagggtccttatttgtctttttttacattgttgctttaaagtctgttttatctgatataagaacaattactcttgcttgcttttggtttctatttgagtggaatatctttttcaatcccctttaccatgagtctttaagaatatttacatgttaggtaagtctcttgaagacagcagatgttcggtttgtaattttttttatccattctgaccatctatatattttaactggagtatttagatgatttacattcaacattaatactgagatgtgaggtactgttccagtcatcatgttgttacttggacactttgttttctttgttgcattattattttacaggccctgtgagtttcatgttttcaggaggttccattctggtgcacatcaaccttttgttgcaagatttagaaattgttttagcatctcttgtagggctggtctgttagagacaaattctcttagcattttctcatcagaaaaatactttatttctccttcatttttgaaacttagttttgttggatacaaaattcctggctgacagtttttttctgtaaaaggtggctaaagataggacctcaatccctttggcttgtaaggtttctgctgagaagtctgctgttagtctgataggttttcctttataggttaccggatgcttttgtctcactgcccttagcatttttttccttcatgttgactttagataccctgatgactatgtgccttggccatgtcctttttgcaaagaatttcccaggagttctttgagcttcttatatttagatgtctaaatctctagtgaggtcaggaaagttttcctcaattattccctcaaataagttttccaaatttttggctttctcttctccctcaggaacatcaatgattcttatacttggccattgtacataatcttatatttcttggataccctgtcgatttcttatagttcttttttctttatttttgtccagttgggttagctcaaaagccttgtctttaagctctgaaattctttcttctaattggtctagactactttaaaactttccactgcattttgtaagtctctaaatgtgtctttcatttccggaagttctgtttgatttttctttaacacatctctctctttagaaaatttttatttatatcttgaactaatttttaaatttctttatgttgattttcacttctctcttgtatcttcctgaataacttaataattagccttttgatttccttatctggtatttcaaagatttcaccttggtttggatctattgctggagagctaatggatgttatagaaccctgttttgtcatattgacagaattatttttctgatttcctctaatctggttaaactatttcttctaattatttttgaatttattttttattcaactgtgatttttcttatttcctttttctccttgaggatgtgactttaatgtttatagtttattttaacctatggctctgggtgctttcaggggtccaatgatgtgatctatcctcaagactcccagcagtgggtaacagcaccagctctgatgggggtggcagaggggtgacgtagattctgtgatattgtttggttataaataggcttaatttggctttctcaaatgccagttgtagtagtaatgaactggtcatgtggacagactgagaacctcctgattaaccaagttgatgcaggcaatggtgataaccgaggtcacacacaagttttctccttcctggttgctgttatgtgcctgcagaggttataatggactctgtcaattggcctacagccaggatgtgaagcttgcaaaagagcactagctgcagtggtagcagtgggatttgtgcttgtcttttgtaatctcgtttgtctatttcacctttgttgtctgtgctgttgagttcttatcaaaaaagttcttgcccatatcaatggcctgaagaatttccccaatgttttcttcaagtaattcatagcttcaggtcttgcatttaagtctttaatccattttgatttgatttttgaatacaataagagataagagttcagtttcattattctgcatatggacatccagttttctcaccaccatttactgaagagattgtcttttccccattgaatattcttggcaccactgatctttgacaaaggtacaaagaaaatgcaatggtcctgtacaagaaaatataatgtatttggagatcagaatcaaggacaaggcgactgagtgtaacaagggagggatatcggctggagagatttgacaagtcagcagggtgcagagatgcagaattccttaagctatgaacagaggtcagctttactagtgggacattattttaagacattaactgaggattctctccttctcctaccaccctgccacattttaggtgcttttaccactcttggaaaaaattgtctcctaaatgtacagtcctctaaaaatgaagagattattcaagaagcacagatattggaatttttgcctatgagttccaaaacagtatttaaagtcatggtagaaaaaaactatcttgaaaggcaacatgctttattaaccagactttctcagagagcaggtaataatggccgtatttattgagcattcaatgtgcaccaggcacagttctgagtctctcatattttgtcctcaggaaaaccctgacaaaggtagcattgttgtccccattatatgcttgagaaaactgaagaaaagagaggagaattaacttgcccaagccacacagcaaagctgagacttgagcccaagtagtctggttccagatgtcatgcctttgggatggtgttttgcttccagtcatctggctttggatctcaagggtcaaacaggatggccctgactgcaccccaccccaacatgggcaggtgatgggaatgaaggaggaacctagaggtgaaagggtggggatgtgctgaacccctgacatgtgtgagggtgcctggcacatagcagaggagagtagggggaggattcaggtagtatctgttggccaggctgcctgggcagagtcagagggttcaaaagaggaaaaaaaatggagctgtctgaaggtaggggaagggggttcacaaaagcgatcaacttgaagggggagacgtagggtgggatgctggcaagaaagggagctaagaattcctaaaagcctaccaggatagaagctgcacccttctatccctgtgttctgagctggctaaggacctcggtcttgggacactcccaaagcatggaggccctatgatcagccaaagaggcagtcaggttcttgggttcagtgacaacaccccacctaacccgcccaggttatgccccttccctgacgcctcccagtcctcaagagccccctgctggctgtcagtagaggcccaggcacagttttattccggagaatctggaaaggcaggtggatgggtcagagggtcactgcaagcccgcgttcaggggctccactcgcagccaaagtcctccttcagcgcgcatgatcagctccggcttcctgcggggctccgtgtggtccagcaggaagcggaagcgcagcagcgtcagcgccaggaccaccttcatcttcgccatggcgaacgcctgcccgatgcagttcctgcgggtgggagtggggactgtgactgcgcccaggatccgcatttgggccccatcacgccggaaacctggcccgggatcctcaaccgcacccagatcagcctgagagatagagaggggctgagcatgcgtgggacccccctgtgggtttgcatgtcccccagagcctgggccagactccagctcccagctcagaccagcagatggaggaggggattctgagcactctgcggaccctctaggacctactcacccccattctatggacattttcccataaactgtgaaggaatggagggaaagagaactggaactgggaccatctgcaaacttccccctttttcgaccctcgcacctatcaccccatccccataccagacacaggtggcccttacctgggtcccgcagagaagggaataaaagccagaggtgacctctccttgctgttctctgagttgaagcggaaggggttgtagacctggaggtaagaccaagagggctgctgggtggggtctcccaggtccagcagccttggaaagacagttgtgtgtgtgttggggcgaggtgatgttggattttcctgatcaaaaccctgcctcctcctctaggaaccttggaattgacaaagagggcagggggtcgggggtggatgggaaaggcagcacctcaggatccggtcacacagttgggttgtgatggattcctataatgttgatgatgcagataatgcctgtgggagagaaggtggcagtcaggacaaggatccccctgaaggacccctcttcctacccggggggctcctccccatgaggctgtgagcatctttggggatgaccctaccatctgggagcacaatgtcccagatgcggtggcgggaggtgtacggaacagggggatgcaaccgcaggctctccttcacgcacatggtcaggaagggcagctgggccaggtcgtacctaaggcaacaccccagccccaatcattatcaagggagcaaagacacacttctccagcttctctatttccaagtgagaccttttctccctgtaacaaaataaactccacatggatcaaaagtttgagaattagaaaaacagaaaaaattagaaaaacagagaattagaagtaccagagaaaatttagccaagtagttaaaaatatatactctgaggaaaacacacccagaagccagctgaaaaaagttaacaaatttgcataaaaataaatattgtctatggcaagaaagcaaactcaaatgcaaatgaataagaaacaaaatacccagatccaatgttttgctcttatttcgcatggaactagagataccagcaagtgcaattaggcaagggaaaaacaagagagtcatgcaatttgaaatgtgggagtaaatgtatcattttggcagatagtgatgttatacttagaaaacacaggaagctccactggaaaacgtttataaacgtttaagatccagtaaaggagctgaattatctgcttaatctttcttcttttgccttggctatttaaaattttaataccatctaaacctatctgattcagaatttgaaaactgtaaaatataatccactcctatggcccaatgccatctacttctccccacatgttgcccaggttattatttttttaatgtgtccttcctgtgctaatatttagtatattaaaaaaattatataggagcacaccatctactatacactagtattctgcatcttttttttttttgagacagaatcttactctgttgcccaggctggagtgcagtggtgcaatctccgctcactgtaatctccacctcccaggttcaggtgattctcctgcctcaatctcctgagtagttggggcttcaggcctgcaccaccatgcctggctaatttttttgatttttagtagagatgggattccaccacgttggccaggctggtcttgaacccctgacctcagatgatctgcccaccacagcccacctcagccttccgaagttctgggattatagccatgacccaccgtgcctggcctatatctttttctcatttaacagtttatcactttttcttagcccctggaacttacgtcaaaataaggttatccctactctggagctatgaaataattttctcatggtttcatctagggcttttaagactcttttaaaaaaattttattaatctggacattatcttgtcataagacatgagaaccagcttgttgccttttttccagaaggctttccagttgtcccaagagcttttacttattttttctcttgatacacagcatcatctttagcatgtactgtgttcattgggcacagaatttatatgtataaatcattagtttttcatgtagaaataaccaccaactgaaaagatgataataaaagatgctagtcataataatataaaatacctggattaaacttaaaaagaaacatgaaatctctgtattttattataaatttctctcaatccaaataaaagatacactttaccatggcaacaaatgtatgtaaggggtgatttaaaaaaaagtcactctaccagctattaaaacctattaagaagttgcagtaatagcaatagtctggcaatgctgtaagaacagaaaaacagacctattcaaaagactagaaagctcagagacagacaagtgaataaatgaaaacttcccatctgctgaaggaagctctacgaaactctgggaaatagatgggtactatggctgcaaaagaaaatgtagacgaacgaaactctgggaaatagatgggtactatggctgcaaaagaaaatgtagacgaatttgacttcataaaaattaaccaaaagtaccctcaaacaagtcaaaaggcaatcttttgcaacaaaagacagaaaaaaagattattgtaatacacatccttttaagtaagtatgaaaaaacaacccgaagaaaaacagcaaaaaaaagaaaaaaaatgtaagatgaccaatcccatagaaagaaaacaaatggcgtatcaacttgggcaaaagatgttcttctccctcttatttaagaaaatgttcattaaaagatgaaatattaaaattgacaaaaacttaaaatttaataatacagtaatgctattggtgaatttatggggaagtttaagcttatgccatcaaactcagctaatataggaatggatttgcactcatttttacaattgtagaatgcaaatggtctttgattcagcaattccacctttgggagtgtgtcctacagagatgcccacacatataaacagtggtcactgtacacacatgccaattgcaacaggtttaatttagcaaaaggctaaaatgagccaaatatacatggataggaagatatttagataaacatccacacaatggaatagtatacagctacacaaaaggaggaaataaggatcactagtcctgtcacacaatgcaggctagaaggtgaatcagtacagagactctgaaaggcagattgacaattccacaataattgaaaatgtttacacaagtgacttcaagaaagggacaggccaaataaagtatggaatgctattcagcagtcaaaaaaatagctatcagacacactgttgagtggaaaaaaaagtgttccaaaatgtctatatatatatctcatagtgcaaaatatatatggaatatataaggagatagatgatagaaagttatgtagatagatggataaacaaacagacagacagatgacaaatcagtatctctacaggcccctttggagaaagggaggatattaggtggggtagcaggaatgtcaaggataacccttgtcttatctgtaatgtctcattgagtgcaagaagaacctgttcttttgtaattcaaactcatttttttgtaattctcattataaactcattttccatgtggtatatatacaaaatggagtgctattcagccttaaaacagaagaaaattatttcatttgtgatagcatggaagaacctggaggacattatgctaagtgaaataagccaggcacaagaagacaaatagcacgcgaccttaattacctgtgagatctgaaatagttaacatagaaatcagagaaactgagaagagaatggtggttaccagaggagggaggaagaaagagtggaaagacggtcaaagggtacaagtttctgttagacaggaggaataagttttgagacctattacatgcatggtgactacagttaataataatatatttttcaaaattcctaagagagtaaatttcaaatgttctcaccataaatatgatgagtatatgaaatggtggttatgtttatcagattgacttaatcattccacattgtatacatatattataacgtcacattgtaccccataaatatatataatattaataaacataataaataaaaataaacttattttccaaaactcatattttgagaaaaagaaaagaaaagaaaacatcttgctgggtacagtggctcacgcttataatcccagcactttaggacaccgaggcaggtggatcacaaggtcaggagttcgagaccagcctggccaacacagtgaaaccccgcctctactaaaaatacaaaaattagctagacatggcggcgggtgcctgtaataccagctactcaggaggctgaggcaggagaattgcttgaacctgggaggtggaggttgcagtgagccgagatcgcgccattgcactcactctagcctgggcgacagagcaaaactgtctcaaaaaattaaaaaaaaaaaaaggaaagatctcaaaagatatagtgttaatgtgcagatctgtgacactttatttctttttatttcaacagcatttggggtacaagtggtttggttacatggatgaattctacagcggtgaattctgaggttttagtgcacccatcacctgagcagtgtatactattcccaatatgttgtcttttctcccttatccacctcccaacctcgctccctaagtctccaaagctgattatatcattctgtatgtatttgtgtcctcacaacttagctcccacttagaggtgaaaacatacagtgtttggttttccattcctgagttacttcacttagaataatggcctccagctccatccaagttgcagcaaaagacattatttcattcctttttacggacgagtagtattccatggtatatatatatatgtcacattttctttatccactcgttggtcgatggacacttaggttggttccatatctttacaattgtgaattgtgctactataagcatacatgtgcccgtatctttttcatataatgacttattttcctttgggtggatacttagtagttggattactggatggaatggtagatctacttttagttctctaaggaatctccttactgttttccatagaggttgtgctaatttacattcccaccagcagtgtaaaagtgttcccttttcaccacacgcacaccaacatctattgttttttgactttttaattatggccattcttgtagaaataaggtggtatctcattgtggttttttcatttgcatatccctgatgattagtgatgttgagcattttttatatgtttcttggctatttgtgtatcttcttttgagaattgtctattcatgtcctctgcccactttttgatggaattatttgtcttattctggctgatttaagtttcttgtagattctggatactagtcctttgtcagatgcacagtttgcaaatactttcttccactctgtaagttatctgtttactctgatgattgtttcttttgctgtgcagaagctttttaattcagttaggtcccactgatttgtttctgtttttgttgcatttacttttggggtcttagttatgaatcctttgcctaggccaatgtccagaagagtttttccaaggttatcttctagaatttttatggtttcaggttttagatttaagtctttgatccatcctgagttgatttttgtataaggtgagagatggggatccagtttaatttttctacatgtggctatccagttttcccagcatgacttattgaatagggtgtccctttcccaatttatgtttttgtatgctttgtgaaagatctgttggctgtaagtatttggctttatttctgggtcctctattctgttccgttggtctaagtacctacttttataccagtgccatgttgttttggtaactatagccttgtagtataatttgaagtccagtaatgtgatgcctccagatttattctttttgtttgttattgctttggctgcacaggctcttttttggttccatatgaattttagaattgtttatccagttctgtgaaaatgatgatggtggtttaatgggcattgcattaaaatatgtaggttgctttgcatggtatggtcattttcacaatattgattcttccaattcatgagcataggatgtgtttccatttgtttgtgtcatctacgatttctttcaacagtgttttgtagtactccttgtagagatctttcaccaccttagttaaatatattcctaggtattttatctttggaactatttttttggcagctgtgtgagtcagagggcagttcttaggtcactggggtaatgttccagaggtgagtataactgcctctgccttgcaaaagagcttgcaaagggagtggagagtagcaggtggcagtaagcctcatccggctcccatgcagttggcaagactgatctcactcctgcagtgctccacccatagcactggatttagatccaagtagtctatgcacagaactcagacctgccccaggccataagcttttcccccagagatagcaatacttttaggccatgcccctttttgtccctgtccaaggccaggcacccagctcctgcactcctgtctgcagtacacttcccgcttgccccctgggttctggtcaagggagttcatccccacttgaggttatatcaagaaattcagttgggcatttcaacctgtgacccctgcctgagctagttggctggcttctgcaaggtctcctgtgagatataataaggaatggcttccctcagtccatgctggagattgggaatgcctgcaaggcactttctgctgctgcttctatttttatatttcttaccactccctaaatcagttccagctctgggtagagttaaggcctccccctgtggtctggcttttcagactccccagtgaagatgtgtaccctggaggcagtctctccccctctcacactctggggattcacagtttttcacctgtctcacagagtaggatgcagcctgcagcttcttttgaagggtctatggattcttttgggtttcctgttaagcctctgtgttgttttttggggaaagaaagttcacagtgtgaatctctacatacttttttgtccttccacaggggagagacacactgacattgcctccaattcatcatcttggaaaagaaatgttgtgtctattttatatactcctatttgtatagaaaaagtctgtgttcatataaagtgggcatcaagataaccattttactggaaggacacacagaaaaccattgatggtagaaaccgctagtgtgagacttaagaaggaagctcattttttatcataaatttatggattttttttgacagagtgcacaattttgcttgaaagctaggtttttaaaagcatagaaatgtgttgccacttcacaggactgctgggctgagcaaagtcttggacgggaggacactgccttcaaaacacctgtccagtccattgcctcctctccatccccagcccctggcctggctcaggtcccagaatgtcctcactgggacttcattctacagctgatcctctctaatatgctctccacagtagtcctgaaaggatcttccttctgcccagatctggcctacccctcccctgctcacccacttcctatggctcctaattgcctttgggttaaaatggaagtcattaacattttttccatgtcttccacagccaggctctgctgccacctccattattattatctcatcatgactcagtttctccctctctcattctctgtctcgttttctcttccctcctctctttatctctctctgtccctcactttccctccctcttccttctttctccctttataaccttctccttcccccttacacaaacaactccttctctttttccctcttctccctctctcccacccctgcttctttctgcatctttgccaaggctgtctttttgacttagaccactactgcatgcaaacgtctactgatcatcattcaggatctcagttagaatacttttatttatttatttttactgttttagagatggattctttctgtattgcccaggctcatcttaaacctgacctcaagtgatcctcccacctcaacctccttagtacttggtatcatgggcgccagccaccacatctggcgtgaaacacttactatattctcagtctgcttctcttgttctcaataccatccttgtccatgtggacagagaagtcctacctgagactcttcccactaggctgggagtacctgaaagacacatccctggacagtgttctttccaggtatccagggaacagaaaggtgctgggaacagaactggcattggtaagacatgtggaagagtttgctgaatgaagactgaatggatgaatgatgcaggtattctagaaagagatagatgacttttacccccaggtctcctttacaactccctggactggactggagggtaggaattagggaacagaagagcaaacatccaggaagtgaagatgtttgaaaaaaatgataattcagagaaaataagaagtgagtgaagggaaaattcattgactgaacatgtctaggtgtcatcatctgccttcacatattgtcaccagctctctcagcaggctaggactctctgtcctaaaagcctgaaaactttcccctgctagccaggctggatatcaagttctgcctctgggctctgctcctaatactactaagcaataatggaagaattgacaaaaacaactttctcccttcccacttggggagcagagccaatgacgggctcaggaacaggccagaagaacctgcactcaccattcaatctctttaggatcgcggtccttcagaagctcttgcacctcctgccggcagtgctcctggtattctgggtgcctcgcgaggttgtacaggacccaggagagaccactggctgtggtgtcatggcctgaaggggaagcaggcaggcttgggtctctgggctgcttcagcaccagagggtggacagcgtccatgcattgaggccctcagggaggatggagggagggggaagataggcagaattgagtgatccagggcccacccaccatgttcctgagatgaaaggacccctgtcctcactgtagtcccacactggcagcctcacctgcaaacatgaaggtgtcagcctctgctcttacatcctcatctgacaacaccttcccatcttcatcctgaagggaaagcaagacaaaccctcccccaaatttactatctctgagactcccgagtctcacctgagacaatctctgaaggtccgatcttcttccagaaactcaaacccactctgaatgtctagatctctcttgttcaccatcaccagagcccccattccaaggtcttccccccagctcctttgccttgtctttggtccctggtgggaggaatcaatgactcgaatattttcatatttctgtataatgaagactttaagagaaaaagatactggcaacttggggtacaggaagtttaaatggcaatttgccttggaggttaaaaattacatattgctttaaagatatttgctcacattctagagtggtaaactcagagaatcttatctttccagaagatatttggattataaacctatagaaattgccatctcactggagagtagtagtttatactcctgaacaaagcattctctctctctctctctctttcaccctgtaaaaaagaaggagcatatgaactaactgtcctatataagatataagactcataatgtgggggcccctctcctatggtgcaaattcttgtacatttacaggtaaaaacattgtgttgccctagaaatggggagccagcacaacaatcctactcctcccactgttactgctgtaaataattaatgggctgctgtaatccaggggtttggtgcatctgtcatcatagatatagacatagacgaagacatagacataaataaaaatgtgaaagactaacttactaacttgtaagttgagtaaaatcgcacgttcttcacagtttcagaattagcagtcccctgcgggctgcattcaacagaatcatctctaaaacctatctgtgaccttccctttctcaagcatcttccatggctcccagtgccctctggatgaagtccaatttatttcatctgacatttgacataaagctccattctatcactgtaattcagatcgtagagaaacccaccttgctcagcagaagcacatcaatgaaatccaaagtctaggacttggctttgttcttgaggaaatcacaataccctgagtgggaagggtatggcgccgctcctggatgacggcatctgtgaagtcgtgcaccaggcggcaggccctgcggaagcgccacccgtcatgggagaggtaatacagaaagtccatgtgctggaggatatgctggtttcttttttctacaagggcactgagctccaagatggtagcaatatattcactgggcctcctgcaggccaagggcagaaagggaggcaacaatgtaacatatgcaaagcccaggaacacctcccaccagcagccaggagctacctcccatcaggaaactgagtatctagaaacagatggtcctagagatacatgatgggtatctgtcctgagattgactctctagactctattccctccctgcatcctatctctgagagctgtctccatgcacctaggtacccggagtgtagcttggacaccatgtttctctcatctcccatccagtatccagtactgatcatattccttaccaaaactgtccacacaactcagacttcatcctcttccacttcagcccgactccagcccccaccataaccaatttgtacccaatgtcagctccatgtagtgtctacactactgtcagattcccacacagctcagctcttaccacagccatcatcagctgaaactccttcaaaagctccctgggaccatcttgataaacttcataccacttttcctgattttcagtgtccctaatatctaatcctatttccacaaccacatttctactgtctgttgcatatgcttggctcatcctaaccttattactgttactcaaatatttctacctacctggaaagacaacactttctccccttccttgaccttaaaagcccagctatgatacaaatcctcccgaaaggtacttctggttactttgctcattcctccctccccaactttctccctttggtccatggattcacatcccaggccctgggaaggaactcactcctgacaatggctgtcaaagctgaagatgcatttctgcagactgtccaaggtcatgaggctgatgtgctcaaacatgtccagacgactgctgccctctgaggccaggtgctgccacttgtcctggccagagaaatgaagacggctagagctgggccctgcctcctttgtgcccctccccagtcccaaacatcaggatggactcccccacaaccagcctcctggtcctctgccccaggaacccattgccagtgaggaccagacttggatgcgagcagaagctgttagtataggagatgaagacccatggcttggagtcaagagacctgcattcaagtctcagccttgtctcctatgttctgtgtgcccttggtcaatctattgccctcctctaggtcccacatgtcaaatattcaataatggtcaagatgatctgctttgggccagataaaccaggacagaatctctgctccaccacccctagatcagtctcctagctggagactggttgaactgtttccagctcgctaacctctctggccctcagtttcatcatctgcaattgggcaaaaataaccataactcacagggttattaaaattaaattagacacatatgtcatggaacggggacatgacattgttttaggcctatggtgagtgctcagtaaatgttctcttcactcttctccattgttacaaagtcatttcaaaaatatccctgtgttggaagaggcacttcttcatcagccctgagcatccttgctgggcatgccaagaatgcaaggccatgatgttcttacttcagccatttttcagagttgtgtttgcagggaacaacctggagagataaggcaatgaatccccctggaccaatatcaggcttgtttctgctactattaaagcagattccttaagcctaatgcccattgtctgtcatgcaatgtactgcatgagcaggcaactagcaaggcccactgtgtcacccccatggaatttaggttgactccgaaaaaggatacaaaccaacaagacatacatgttgcttgctgtgcctgagtaatcaactaccctttgtctctgacccaggggtcttgtgtcttctattagaatgcatgaaacagtaacaagctaacttatcagcttgcaagtaaaagaaacatcctaggcatatcacaaaatcctgacccccagttcttcacttctctttgtatttacaccctttgcgcagtaatttttcagcagcttccattaatagatggattctattttacatcccttttagtctgtgctggacatttgattttctttggccaatacagtgtggtgaacatgatgatgtaataactcgaatagccccaaggctggttgaactttgaagattgcagagacaatgtccagaaatattgcagcctcctctcagtttctcggaacccagtctctgccatgtgaacaacagggtgccttctggaggcagagaatcacatgggggaaagtccaggtgtcacagctgaggccatcccagatcagcctgaagctagtgaagccctaaacatgtgaatgaactggaccaggatcagcaaagctgcctacatgccccacagctgctcatgtaccaaagttgatcgcatctacatccggaagaaccagctaaatgtctcacagactcattagcaatcataaacctttattgatctaaaccaatgggtattgaagtggtttgtaattggtaatggctactatgcaatctttgtctttacttttgcatttacctggcttctgtgaaaggaacatggaatctgacaccttctgagtatctactatgtgctagggacatgattcgtttgcattatcttaccaccttttaagtagggattatcatccccattttacagatgaggaactcaaggctcagagaggaacagcaatggcctaatgctacccagcagagccaaaattccagaccagatctgtccatggtccctccaccccaagactcctgctgggacccagagttcaaggaactcacgtgcatgatgttcacactcctgttgaagatctttatatagggtttcaggatgttgaaatggaaggcgggcgtcagcatccgacggtggcggctccacttgtcaccgccactcagcagtatcccttctcctagtagggcagccaaggacagtgggcaagagcagcaccttccccacccctgctcaaggttgtccccagcccctttcacctgcaggtactcacccagccagggcttcaggaacctgatggagagatcatccttgggcgcaatagcagctggcatgaatgaggaccatcaggggccatgtagagggcaagagaggaacttcaggtataaggcaaggctccctaccagcactttccctactccatgcccagcatagcaggaagggggccaagggcaaaggacgaagggaggatagaggaagaaggaccagcccaggctgcaacagcacagtagagcaatgacacaacctaacagggcacagcactccccagcacgccttgacatggctcctatatatcccaacatgttctgcaacaactgagcacagctccacactctacaaaatatctttaaaggagcctaggacaccctgtctgccccagcactctctgtcatctcctgaaatggacctgggacctggggcatgtctccaatgttaacatgcctgacatggccacagcatacatgatgagccctaaatgacacatcgtctgacatggacctaagatagtcttgcatgacttctgtgtacctgacaggccccagataggatttaaatatgatttattaaatgtcctggacatgtcccaggtgtaaccaagacttctcttcaagcatgattggaatggattctgagacctggctcaggaagactaaaataataactctgacaattctcaaagggaccctgggtcccagatcttggacaagccacaaacatggccaagagatgacaagaaggagaaaagacaatttcaaaccacatgtcagagaagaaccagaaaggctgggacatgccccaagtgtccttggccacagctgagccacacacatgatgacttctccatatgatcccaggtaaaacatacgagatataatcaggtataatatagaaatcgtaggctatttatgggaccccttggggaaaggtgagctttctgacaagagctgagcttccaagacccatggttgacaccataagagaagggctgccttaaaagaaaaagtgacttccacaatggttgaaagtataataataaaagaaaagaaaaaaaaaaagaaaaggtgatgcagagaaatggtgaaattaaaaggagacaaattcctgatgctgtacattgacacctggatccagccatgcctgaagaccactttctctggactttacactccgttgattccctttatttgcttatagtgcacaaagttgagcttccatcactcacaggtgaaagagacctcagcagccagagagagcaggtgacctgcacagagtcactaagcattttggggtcagagccatagtttctgtgggacgttgctccttcccttctcagcctggtctgtccaaggatgggaagagcagagaataagggaagatcaacaagctggtgtgggatctctactggagattcttgaggcctacaggaggacagcagtgagcgtagggtggatgagtgacaggataaggtagaaggaactgacccatcatagatggatgtcacataaatagcagcccagaatcaccaccagcgacaagtcctcctaccgctctaggctgaaggatggacaaggttggtgccaggactggctgggcccccaaataccaatgatgctcattacatcatcctaccccacacttaaaaaaattcctactcataggtccagacccagctccaacaattcctcctccaggaagccttccagcctgccgcagcagaaccctagttctcctgtgggttttcacacccatctctctcttgcccattcctgaccccatgaatttggggttgtctctgtccagatccatctcctcaagtgtggaggttccttcaggacagggttctggattgaggcttcctggggccctggtggttcccagaacaccagagcagggggtcagatggcaaaggagttggaagacattgagatgaaatttggcaaatacatgaaggaaagcagaagatgcctcttcttctttcaatggagggagaagagagaaagaggggcctgggaactgcaggggcttcacagaagcctaggggagaaggagctggaagcccttggatggaagccccagcacccaccaccacaagctctgcatgggtacctgaggcattggtgatagaccggacgatgtcagggtggcataaaacgatgaaggggaagatgggacccagccatatcctaaagccctggggataggtggctgacatctgggtcaagttcttcaagccttcctctgtagcaatgatctgaaagcaagtcaggggccatcaccccttgtgatggttaattctaggtgtccacttgacagggctaagggatgcccagatatctggtctaacattatttctgtgtgcgtctgtgtttcaggagagattagcatttgaaggtaaactgaggaaggaagacctgcccttccttatgtgggtgggtgtcatcaaatccattgagggcatgaacaggacaaaaaggcagaggaaagggggaatttgctctctcttctgcagctgggacatccgtcttctcctgccctcagaactccaggttctcaggccgttttggactcaggctgaatttacaccaccagcgtccctggtttctggcttgcagatggtatatcatgggaattcctggcctccatcatcacattatccaattcccataataaattctctctgtctctttctgtctccatacatacatgcattagaggtaagaagaaattcccatctaaggagattccatttctagggagaaccctgactaatgcacctccctagaaggagccacggcaagtccccctgcagccaccagatgtggtgcagcctctgcagtgagcagcgtgtctggattctcaacagctgcagggggtttctgctgacctctgctccttctctcttggggctgtcccaggatccgaaggtaaataccaaagcagagagggaagacaagctgtctgctcaagaggatgtgttttctcatcctggaatgatttcagtctggggattgctttatagggaaaggtccccatgggaggtggtttgggacggcagtgtggcctcaggacatatccctagggcagattcccacatccttttgtgtcctggctggtccacatgggctctggttccccccacagataaagggtctgcacactgaggacccccccattctcagcagcccccagggaagcagaggtgactctaatgtccctcaggatggcagctcccacctgggagaacccccccttatgccaggctctgtgctagtgcctcctgtgcacctgtggacatgcccatcaatcctgccatttatgagtgagcagacggaggccacgtcccccaaaggggagggcaagtccaagtaggagggcaaggtttgggagtgtcaaggacggcttctgaaaggggaagagagtggccaaattatatcccggttgagctacagggctcattgggacatctgagtggggaagagcacgtcacccctggaaggggaaggtgtgggagactgcctgcacttctcttctggcccagcagtgtccctccataggggaaggaagtcagagctaattcctgtgggaaagcagcagcccagagatgagcagacacaaggaaatgggtcaggcagggagcagcccctggatagtgggctcaggaggcctcaagtccagagtggagaaggtggggatgccaggagagccctgctctgtgccccacagtactgcaggagccccttggaggtgcactattgtaggaaagacaggcagcaaaaggatccagacaggctggggtgggaggacaggtaggtgagaaaggcttgggatggaactacagaggaatgagtgagtgaggagaggagtgagtgagtgaggagaggagtgagtgagtgaggaggggagtgagtgagtgaggaggggagtgagtgagtgaggaggggagtgagtgagtgaggaggggagtgagtgagtgaggaggggagtgagtgagtgaggaggggagtgagtgagtgaggaggggagtcagtgagtgaggaggggagtcagtgagtgaggaggggagtcagtgagtgaggacgggagtgagtgaggaggggagtgagtgaggaggggagtgagtgaggaggggagtgagtgaggaggggagggagtgagtgaggaggggagggagtgagtgaggaggggagggagtgagtgaggaggggagggagtgagtgaggaggggagtgagtgaggaggggagtgagtgagtgaggaggggagtgagtgagtgaggaggggagggagtgagtgaggaggggagtgagtgaggaggggagtgagtgagtgaggaggggagtgagtgagtgaggaggggagtgagtgagtgaggaggggagtacgtgagtgaggaggggagtgcgtgagtgaggaggggagtgagtgagtgcatgggtagaggagtgagtgagtgcatgggtagaggagtgagtgagtgaggagaggagtgagtgagtgcatgggtagaggagtgcgtgagtgaggagaggagtgagtgagtgcatgggtagaggagtgagtgagtgcatgggtagaggagtgagtgagtgaggagaggagtgagtgagtgaggagaggagtgagtgagtgaggagaggagtgcgtgagtgaggaggggagtgagtgagtgcatgggtagaggagtgagtgagtgcatgggtagaggagtgagtgaggagaggagtgagtgagtgaggaggggagtgagtgagtgaggaggggagtgagtgagtgaggaggggagtgagtgagtgaggaggggagtgagtgagtgagtgaggaggggagtgcgtgagtgaggagaggagtgagtgagtgcatgggtagaggagtgagtgagtgaggagaggagtgagtgagtgaggagaggagtgagtgagtgaggagaggagtgagtgagtgaggagaggagtgagtgagtgaggagaggagtgcgtgagtgaggagaggagtgagtgagtgcatgggtagaggagtgagtgagtgcatgggtagaggagtgagtgagtgcatgggtagaggagtgagtgagtgaggagaggagtgagtgagtgaggagaggagtgagtgagtgaggaggggagtgagtgagtgaggaggggagtgagtgaggaggggagtgagtgagtgaggaggggagtgagtgagtgaggaggggagtgagtgagtgaggaggggagtgagtgcatgggtagaggagtgagtgagtgaggagaggagtgagtgcatgggtagaggagtgagtgaatgagccgcctccctcgcttctctgccggcccacacctcagccaccctctaaacccagctccttgatcccccttcctgccctttgggaattccatccaccctgagatcccagagtcatcctgctgccacactcacgaggtcctggttgaccccaaaaccatttctgttttgggggttgtggaaagtactgaaggcggcggcagttgtcatagaaggcataggtccaggccaggaagccggccaggagccgggaggccccagccagcagcaggagcagccacgggaatgctgccacctgcccgaggcccagccaggacaggctcagctgcggcatcctgcagggcagacaggatggagggtgagatcctgaggcccagggaaagtctcagggagctccagggacagtggagagaagcagggaaggggtgggtggaggcaggaaagggagggctctgggatgaataaacaaggactgagagctaaattccagaaagccccagccaaatccaatagccaagtggcctctagttgcctagtaaccacccagaaaggagaagagagagagagactgattagagtccagaaaggcccagcctgaatcactgggaggttgccaggggtccggttaccaggaaaccaccagtctcccaggccagcagcctggagacaccccagccttgggcagtgcccctccccatcccaggccaggaggctccagtctgaccacccccagcctggcaccttctgtcaggagcagcttgtaccacacaacctcctctcctcttctgctgggagttctttgcctctggcccctgatttagggaaaggtcgtgggaggctgggctgcgctgggctgggccagtcaatctccacagcctgggtgcatctcccttgcctgggagatgccggccaaaacctggggtttggccagctgggtgcagaggaaccagctcagggtgccccagtatggggactggatcctcaggtctcagcatctccctcacagtttagaggggaagttggggagtggttaaaggggactctgagccccaagtttacagccaccctgccctttcaaggcaaggatgtggcaggtaaaagcatgaacttgagagttcacagccacctgagctgggccaggccaacccttgtcccagatcatctgggctcctctccaaacatgggcggggaggatgtcaggtgctgcatcttggtacagacttaggagattcagagacagaagcctctcatctctggcttcacagcctggcaagagttcaagtcctgcctccaggcagcccagggcctgagctgagacctgactgcttgaagcaggaagaaagaatccagtcccaaccctgctgaggattacctgggtcagagtctggggataaagagcccagctggaggagcaaatctagaggctgggctcagcttagaggacagagcagaggcataggggatgaggctgagaggggctgtgagcagacggggtccaggcaggggagggcagagcgaggggaccccgagtgtagtccttgttctgacctgtcctttctctgactgtgggcaatgtggccatcctgggctcaggcttcccatctgggaaatgggatgtcagatgaggccttagagggcgacagaggaaggctcctaagaagagagagctccaaaaagagggactgaagggaaggggatgacaactagcacttgagctgctgtgtgcctgtctctactccatgcgaaagactgtatggaaaacactactgtgtgtacctactgcgtgccagtctcactatataaagtgcacctactgtgtatcaggtactctacataaattctgtctactatgtgccaggtacaccacataaacctcacctactgtgtgcagcatgctctacataatgtaagcttactttgtgcagagtactttatacaaagcgtgcctactctgtgccacatgccatatataaagcatacctactgtgtgccaggtgctccacataaagagtgtctactgtatgctgggcgcccttcacaaatcctgtatcttgagtccctggtcctttatataaaccatgcctgctgtgtgccaggtgttctaaataaagcacacctattgtgtgccagatgtcctacataaaatgttcctcctgtatgttgggccccgtacataaaataaaactgctctgtgcaacatacttgacataaagcacacatactatgtgccaggtacactacataaagaccacctactgtgtgccaggtatgccacataaagtgtgcctactatgtgttaggtactccacgtaaagtacacctactgtgtgccaggtgctctacataaagtgcacctactgtgtgtcaggtgctctacgtaaaccacacctgcttgtatcagatgcccagctggatgacaacgcccaaagctgtcccactaccctcccatcagctctctaggccagagtcccggggattgttggagagacccaaatgatggcatccagaggagggaagatgtccatttaacataaaagcaaactgaggctcagagaggccaggcctctagcccaagttgcagagctcacaggaactcaggtctatgagaccctcaagtccaaatcctttccttctgccgtgctgctccacccccattcattagggtcaatgccatattaatacagggacatttataatggaggaatttcaggcagcgtggtggcccagaggggagctatctggaggctgttgaatcagcacctggctcctcctcccacacccaggatgctccacccaacagatccagggctctcctcctggccctccctggatcctgtccagaattgccctatggggtagactcgggagaagggggtcttgaaggatggggctcctagcagagctgctgagcaggagggtggggaagacagtgctcctgacactagctgggtgttggggagcccctagacctcccccaccccaccaccactgccagctcaatcagccaggggattcaggctgaagggggccagcccctccacccctgtgggtatttctcgtcaggtggtacgagagactgagaaaagaaataagacacagagataaagtatagagaaagaacagtggacccaggggactggcacactcagcatgcgaggacctgtaccggtgccggtctctgagttccctcaatatttattgattactattttcactgtctcagcaaggggagtgcgagggagaagagggtgaacagggtgatgatggggagaaggtcagcagggaaacgtgtgagtaacagaatctgtgtcatgaataagttcaagggaaggtactgtgcctggatgtgcacatgggctacatttatgtttctctttacccaaacatctcagtgtagcaaagagtaacagagcagtattgccaccagcatatctcgcctccagccacagggcggttttctcctatctcagaatagaatgaacagtcagatttatactgagacattcccttcccagggacatgtgggaaacagaggccttcctcttatctcaaccacaaagaggctttcctctttcactactcctcctcagcacagaccctttacgggtgtcgggctggggacagtaaagtctttcccttcccacgaggccatatctcaggctgtctcggtgcggggaaaccttggacaatacccaggctttcttgggcagaggtccctgtggctttccgtgtccctggttaatagagaatggagaatggcgatgacttttatcaagcatactgtctgcaaacatattgttaacaaggcacatgccgcacagccctaaataccttaaaacttgattcaatacagcacatgtttctgtgagcacagggttggggctaaagttacagattaacaacagtatctcaaagcagaacaatttttctttgtacagatcaaaatggagtttcttatgtcttcctttttctacatagacacagtaacagtctgatctctctttcttttccccacatcaggcagctggacttacagcccccagtaagtggggtgcatcacccaatatacccaccccctctgcaaggacagacctcacctgctggcagttccattcctgtcagactcagggagcaaggccagagtttcatgaacaggtgggcagattgctttgagcccaggagttggagaccagcctgatccacaaggcaaaaccgtgtctctataaaaaatacaaaaactggtctcaaacaaacaaacaaacaaacaaacaaaaaacaaaaacaaaaactggccgggcgcagtggctcacacctgtaatcccagcactttgggaagccaaggcaggcggatcacgaggtcaggagatcgagaccatcctggctaacactgtgaaaccccatctctactaaaaatacaaaaaaattagctgggcctggtggcgggtgcctgtagtcccagctacttgggaggctgaggcaggagaatggcgtgaacctgggaggccgagcttgcactgagccgagatcgcaccactgcactccagccttggggacaaagcaagactccatctcacaaaaaacaaaactgaactaaacaaaaactaaactagccaggcatggtggcatgtgcctgtggtcccagctactcaggaggctgaggctggagaatcgcttgaacccataaggcagaggtgctgtgagccgagatttcaccactgcattccagcctgggtgacagagtgagacactgtctcaaaaaaaaaaaaaaaaaaaaaatctagattgcaattactttctttaagcacatggaaaaggacatctatagtcttccagattttacttttggcattgaaaagttagctgtccatctccttagaattaatctctctctttactcccctcttcttaactactgttatttttttctctctttttttttctgaagttttaacacaatgtgttacggtgtggatttctctttatggttgcttggggttcattgaggttctcgaatctaaactgttttcaatcagttttagaaaaatcttggccacaatttcttcaaacaatgcctgtgccctattttttattttacttctgaaattctaattaaacaaaggttacactttctcattctgaccctaatgttttcttccctctcttttatttttatttatttgtttgtttgtttgtttgttttgagacagagtctcaccctgttgcccaggttggcgtgcagtggcaccatcccgctcactgcaaccttcacctctcgagctcacacgattctcctgcctcagcctcccaagtagctgggattacaggtgttcaccaccacatctgactaattttttttattatactttaagttttagggtacatatgcacaacatgcaggtttgttacatatgtatacatgtgccatgttggtgtgctgcacccattaactcgtcatttaacattagatatatctcctaatgctatccctccacccaccccacaacagtccctggtgtgtgatgttctccttcctgtgtccatgtgttctcattgttcagttctcacctatgagtaagaacatgcggtgtttggttttttgttcttgcgatagtttgctgagaatgatggtttccagcttcatccatgtccctacaaaggacatgaactcgtcattttttatggctgcatagtattccatggtgtatatgtgccacattttcttaatccagtctatcattgttggacatttgggttggttccaagtctttgctattgtgaatagtgccgcaataaacatacgtgtgcatgtgtcttcatagcagcatgttttataatcctctgggtatatacccagtaatgggattgttgggtcaaatgatatttctagttctagatccctgaggaattgccacactggcttccacaatggttgaactagtttacagtcccaccaacagtgtaaaagtgttcctatttctccacatcctctctagcacctgttgtttcctgactttttaataatcgccattctaactggtgtgagatggtatctcattgtggttttgatttgcatttctctgatggccagtgatgacgagcattttttcatgtgtcttttggctgcataaatgtcttcttttgagaagtgtctgttcatatccttcacccactttttgatggggttgtttgttttttcttgtaaatatgttggagttcattgtagattctgagctttgttcttttggcttaggattgacttggcaatgtgggctcttttttggttccatatgaactttaaagtagttttttccaattctgtgaagaaagtcattggtagcttgatggggatggcattgaatctataaattaccttgggcagtatggccattttcacaatattgattcttcctacccatgagcatggaatgttcttccatttgtttgtatcctcttttatttcatcgagcagtggtttgtagttctccttgaagaggtccttctatctgatctttgacaacatgacaaaaacaagaaatggggaaaggattccctatttaataaatggtgctgggaaaactggctagccatatgtagaaagctgaaactggatcccttccttacaccttacacaaaaattaattcaagatggactaaagacttaaatgttagacctaaaaccataaaaaccctagaagaaaacctaggcaatacctttcagtacataggcatgggcaaggacttcatgtctaaaacaccaaaagcaacggcaacaaaagccaaaattgacaaatgggatataattaaactaaagagcttctgcacagcaaaagaaactaccatcagagtgaacagtcaacctacagaatgggagaaaatttttgcaatctactcatctgacaaagggctaatatccagaatctacatctgactaatttttgtattttgagtagagatggggtttcgccatgttggccaggctggtcttgagctcctgaactcaagtgatccacctgcctcagcctcccagagtgctgggattacaggcatgagccaccgcgcccggcccccaactcactaattctctcttcaattgtgtctgacatgcattaaacttctcctgggatattaatattgtagctttggttctaaaaattatatatcttttttttcaaatcaaccctgccgctctttacaatgctttatccttgaagatatttccaaaattacatttcgttatttaaacttcgtaagcaatattgtttcatagtccttgcctgataattccagtatctgaaatctttgttggactgtttctggagttatggggaactgggagattctgaaggtgttgatacctgggtcatgatgcaccctgtcaagtttatggggaggaagaggcagagctggagctcttggcccctccactccatctgggcttgctgcaggaacctaccgtgtgaccttggccttgttccctgccctctgtgggctttgtgttcccagaggcaaccatagaggatgcttcttctgagaatcacacctctgtgtctctccagatccctttcctgatatctgttgagaagagacaccatcctgggaaacatcacccagaatccagtcccatttttccaaaatgcttggaattggggcagcccagcccagcctcgctagccgcagggggtggtggtggtggtggtgtcagggtttgatggtggtgtcagggtttgatggtgagatctttagggaggaggtgatgtaaaaactgaaacctcaaatgagaacaggactgagataagtgagagtgagtagtggtggaaggggtcccaggcaggaggaagggaggaaagatggaagaagggaagaagagaggaaggaaggaagagaaggaagaaaagagggagggaagcagcaaaggaaggagggaggcaggaatggagagggcaatcccaaggtcccccgcctccctccttggacttcgattaccctgcatcctgcatcccaggcaggctcctcaagacacctctgggaacgtgccactggggaagacgcctgcagagatgaagctctcaccctgggtgcactgtgcccagggccattacaggcctggctgcaaggcgtccctaaaggtctctgatgaaggtaagtggagtcgtctatttccaaacctgctttccaggatgaagtggcaagagtactgggaggtggaagggagaaggcaagagaagcagggaaaattggaacagagggaggcacaggtttgggaaaagaaacgagagggagcatgggatgatatggagtaggggttctatagcctcagccacctgactccaggctggatcagcctgtcctcactccaagtcccccatagagtccacctactgcctagagcagccccctttccacagcagtcgtggccaccagggtccatgctggggtggggagtggtctctatactaagttgtggaggagggtggttctgagccaagcgggtgacattgagtgtgtcaccatgcatgtgggtgtacttaggcatcacccatgtgtactcctgccttcactgtgtgtgtgtgtgtgcagttgtgtgcgcttgtatgagattattgtagctgccatttcaaagtgccgcaaaccttgtggcttaaaacaagataaatgcattcttgcagggttctggaggctagacgtcttaaagcaagacgtctacaaagctactctccctctgaagattctaagggagaagatgccttgcctcttccagcttctgggtgctctaggcattgattgatttgtagctgcatcgctccaatctctgcctctctcttcacgcgaccttttcctctgtgtgtcctcccctcgtctttgaggggcaccagttgttggatttagtaaacaacctaattcagaataatctcatttttatttttattattattattttttggacagggtctcgctctgtcacccaggctggagtgcagtggcacgatcacagctcactgcagcctcgacctcccaggctcaactgatcctcccacttggcctcctaagcagctgttagcgcaggcacacagcaccacgcccagctaatttttgtagagatggggttttgccatgttgctcaggctggtctcgaactcctggattcaagcaatcccccgccccacccaccttggtctcccacagtgctgggattataggtgtgagccaccacacccagctgatctcatttttggatccttaccttaatgacatctgtaaaagactctattgccacctaaggtcacattattttattttagtttagtttagtttggtttcagggtacatgctcaggatgtgcaggtttgtcacacaggcaaatgtgtgccatggtgctttgctgcacctatcaacctatcacctaggtattaagcctggcatacattagctatttttctgaggctctccccacccctgccctaccccaacaggccccagtgtgtgttgttcccctccctgtgtccaaaggtcacattctgaggttctgaatgaacatgagttttggagggacatgattcaacacacacagtgccctcacacatggaatggctgtgtgtctccagtttattccagccccagatgagcaccaggcatttggcaagggctccataggtgtgtgcagaatgagtggtggtgtctctggttctggctgggggtgtcaccgccagtgtgcatttcagagccagtgcgactgtgtggcattgctcagatctgtctgcctttgcatctgtgtgttcagttgtatgataaagtgcataagcagaaagagctggatgagttgaattgtgtctcctttgaggagagagggcactggagcagggtctgggagcctgcgtgtgtgccagcctgggattctgcatttgcaccagcctgggattctgtgtgtgcaccagcctagggttctgcgtgtgcatcattctggagttctgtgtgtgcagaagcctgaggttctgcgtgtgcaccagtctggggttctgcctgggagccctcagctgggagaaggaccctgacctttgtccttccctaggtctagacttgtgcaggggagttggagagcccccttggagatttctgctaaggtgctgttctgggaaagagtgggacagaatgtgccagagagctgagagagccctttctgtatttctcttttcttttttttcttttcttttctttttttttttttgagacagggtctcgctctgtcacccaggctggaatgtagtggcatgaacatggctcactgcagcctcgaattcctgtactcaagcaatcctctcacctcagcctcctgagtagctggaactacaggtgcacatcaccacgcctggctaatttaaaaacaatttttttggtaaagatgggatctcactatgttgcccaggctggtctcaaactcctggcctcaagtgatcctcctgcctcagcctccaaaagtgctgggattataggtgtgagccactgggcatggcccctttctgtaatttttagtaacatttgtgcatttaggagcagggaccttggagcctgttggtagccaggagagaggaagaggtgagctgcacaagggagggagtgctggagggtaggaggcatttacagtgacagaagaaggttcatctggaatggggttgaagtccctgactgtcacagtgccaatgtgagtcacctggcaggcaaggatgagtggcaaccagctcagcagacagcaaacagcaatgatgacagagatgatcacgacaacgtcagctggcagccttgagaactgtgtgctaagcacttggcatcccgtcgcccagggaacccccagggcaggtctctggttatcccagcatacagtgagaacctgggatttgaaccatgggtctgcgtgactccacggcctggatatgtcttagagaattgtctctggctgtcagaagagggatggggcagaggaggggagattggtaagcaccgtgggctgagagagagggcgtgaggccagagctggggttgtgtccctgctatagagggggagggagtgaggctcagagatgacagatgagggagaggagggatgaagaagaggagggagttgaggctatgctgcagttgttggcttggctggctgggtcccctccagcccacacatgctacttttctgtgtggaatgatcattcctaacttgagccaaactgtccattttccaggtggtattctgagtcctccaagcattgggctaaccttggctctgagagatagttagtgacaatcttctaggtagggctaggaggaagtgtaatattggggtgaaccaggtcccaggtaagtattcgaaaacgtgctatcacaacagtagctttctcatagaagtaaaaagtaggacagaggatactagaggctgggaagggtaggcagaagggagagatagggagaaattggctaaaagatacaaaattacaaatagaggccagggatggtgactcacgcctgtaatcccaacaattcaggtggccgaggcaggcagatcacttgaggacaggagttcgagaccagcctggccaacatggcaaaaccctgtctctactaaaaatacaaaaattagccaggtgtggtggcgggcacctgtaatccgagctactcgggaggctgaggcaggagaatcacttgaacccgggaggcagaggttgcagtgagccgagatcatgccactgcactccagcctgggcaatgagagcaaaactccatctcaaaacaaacaaacaaaaataagtaaatacaaataaaatttaaaaacagtagtcttcagttaatcaaagatatctatatagttatatagataccatacacacacacacacacacacacacacacacacacatttttgttggacttaaactacagatgtactccgcaactcctcagtgatattttatcatccttatttgatcatcattgatatgaacaacaggggtgatctcattttatttattcccatttatcatcatgtctcacttctacttcccttccctgcccccaccacagacagctgttccattttgttcaaagtgtatccctttgtttgcatgaattattattatttttttttttttttgagacggagtctcgctctgtggcccaggctggagtgcagtggcgccatctcggctcactgcaagctctgcctcctgggttcatgccattctcctgcctcagcctcccgagtagctgggactacaggcccccgccaccacgcccagctaatttttttgtatttttagtagaaacgggttttcaccatgttagccaggatggtcttgatctcctaacttcatgatctgcccgtctcagcctcccaaagtgctgggattacaggtgcatgaattattattaaattctccagcctaggtgacagagtgacacttggtctcaaaaaaaaaaaaatcctctcttttagcttttttgaaaatatgcaataagttacaattagccatattcacccaccagtgctgcagatcttactggaattttgccagtttgtcagctaattccctctttatgttctagggcacaattcatttcatttagttgttatttctatttttcattatcatttttttattcgcattttttaattttccttttattctaaagattattatgtgatatgttactgtggcaatatcacgtaactcaacctgatatttatgttctaaatatataggtagttttaagggtcctcatcttagtaatttccaattttatttcagaatgctcagaaaacctgggtctttcttttattagcacttgctacaaattaagagaactttagtctgaccatccatgccggccctcaatcttaaattctttgtttgtttgtttatttttgagacagggtctcactgtgtcgcccaggctggagtgcagtggcgtgatctcaggtcactgcaacctctctctccttggctcaagcaattctcccacctcagcctctcaggtagctgggattacaggtgcatgtcaccatgcccaggtaatttttgtgcttttagtagggacggggtttcaccatgttggccaggctggttttgaactcctgacctcaagtgatccacccacctcggcctcccaaagtgctgggattacaggagtgagctactgtgcccggcccttaaccttaaattcttaagtgtttattccaggccctgtggcaggtacattatgagcataatcttattaaatcctcataacaaccctgtcaatttgggattattatccatttcttttagggatgagaaaactaaggctcacaacaatcaagggaccaacccacggtcccctagctctgaagtggggatccaacccaggtgtggctgaatagagaccaccgagatttaaaaataggaataataattattatttttatcagtattactatttgtgaggttcttactacgggccaagacttgtgcaaagcaagtaagatgcatgatcttatttaaacctttacacagtttgtttttgtttttgtttttgttttatgagatagcatctcgctctatcacccaggctgaagtgcagtggctcagtcatagctcactgcagccttgacctcccaggctcaatcgatcctcccacctcagcctctcaactagccaggaccacagacatgcaccacaatgtgtggcacattttcttatacttcgtagacatgggggtcttgctattttgcccagactggtctcaagctcctgggctcaagtgatccttctgcttcagcctctgacgtagctgggaccacaggcatgcaccaccatgcctggctaatttttttttaaatttttattttgtagagatggagtttcactatgttactcagggtggtctcaaactcctggcctcaggtgacccccctctgcctccgcctcccaaagtgctgagatgacaggtgtgagccatcattcccaggctaaacttcagcacattattattaacatatttttggccaggcgtggtggctcaagactgtaatcccaacactttggaaggctgaggaaggtggatcacctgaggtcaggagttcgagaccagcctggccaacatgctgaaacccatctctactaaaaatacaaaaatcagctggcgtggtagcacatgcctgtaatcccagctactctggaggctgaggcaggagaatcacttgaacccaggaggcagaggttgcagtgagctgagatcacaccactgcactccagcctgggtgacagagcgagaccccatctcaaaaactaaaactaaaaataaataacatatttttgcacatggagtaaccatggcttggacagatgaagaaggcgctctcagatgtcctcccaggtgggagtcactagacacccctgtgctcctaaccactgggtcttctttcctctctccaccaactaggggtggccgccatgcaggggctaaaccacacctccgtgtctgaattcatcctcgttggcttctctgccttcccccacctccagctgatgctcttcctgctgttcctgctgatgtacctgttcacgctgctgggcaacctgctcatcatggccactgtctggagcgagcgcagcctccacatgcccatgtacctcttcctgtgtgccctctccatcaccgagatcctctacaccgtggccatcatcccgcgcatgctggccgacctgctgtccacccagcgctccatcgccttcctggcctgtgccagtcagatgttcttctccttcagcttcggcttcacccactccttcctgctcactgtcatgggctacgaccgctacgtggccatctgccaccccctgcgttacaacgtgctcatgagcctgcggggctgcacctgccgggtgggctgctcctgggctggtggcttggtcatggggatggtggtgacctcggccattttccacctcgccttctgtggacacaaggagatccaccatttcttctgccacgtgccacctctgttgaagttggcctgtggagatgatgtgctggtggtggccaaaggcgtgggcttggtgtgtatcacggccctgctgggctgttttctcctcatcctcctctcctatgccttcatcgtggccgccatcttgaagatcccttctgctgaaggtcggaacaaggccttctccacctgtgcctctcacctcactgtggtggtcgtgcactatggctttgcctccgtcatttacctgaagcccaaaggtccccagtctccggaaggagacaccttgatgggcatcacctacacggtcctcacacccttcctcagccccatcatcttcagcctcaggaacaaggagctgaaggtcgccatgaagaagacttgcttcaccaaactctttccacagaactgctgaaatggctgactttctctcaagagatgtagcgaatgggaacactttagtcttcctcctttatttcttttcctttcctccctccctcctttcctccctccctcccttccttccttctttccttcctccctccctcctttcctccctccttctctgacctacagtccaccctccctcccccctcctccttgccttccttccatccttcctccctccctccctcccccttccttcttctctgcctacttccctctttcccttctctctgtctctttctgtttctatacctctctgtctctgtcactctctttctccctccttgttcttttgtttttgtttttgtttttgttttgactgagtctcgttctgtcacccaggttggagtgcgttggcacaatctcggctcactgcaacctccacctcctgggttcaagcgattctcctgcctcagcctcccgactagctgggattacaggcacacaccaccatgcctggctaatttttgtatttgtagtagagacggggtttcaccatgttggccaggctggtctcgaactcctgacctcaggcattatgcccacctcagcctcccaaagtgctgggatcacaggcgtgagtcaccacacccagccctgacttttttactgtagacatcccagtggtttcttattggggttttgatttgcatttccccaatgactaatgacaggctttaggtgcttaacacatgtgagttattttacttcacagggaagataggattactaactccattttgtttgttcgttagttggttggttttatacacggtcttgctctgttgcccaggctggagtgcagtagtccaatcatggctaagtgcagcgtcaacttctgggctcaagcaattctcccacctcagcctccagagaagctagcactgcagatgcatgccaccacaagggtaactttgtattttttgtagcgacaggatctcacgatgttgcccaggctagtcttgaactcctggcctcaagcaatcctgccatctcggcctccccaaatgctgggattacaggcatgagccgtgacaccggccaagttctattctgaagatgaggaagctaagttatgaagagattaagttaattagccaaaggtcttgtcactgacatggaaaagctagaattgaacctattctttaaattagagctggggataagaagtacacatttctcagggcctgtgaagaggggaagtcagtctgttccagaaagggaggaagagctggattgaaaacaagagacacattctagctagcaccaatggagtgagcccagaactagaaatatgctgtctctatgggtttaggaggaatcacccagtgtcagagaattagggatacaccttatgagtttggccaaactggctgtagtatttctgtgttttttagtagacgtgttaatacgaaagagtgtgtcacattcaaatattaaattgggccaggcacagtgcctcacacctgtaattccaaaatttggggaggccgtgacaggaggatcactggagtccaggagttcaagaccagcctgggcaacaaagtgaaaccttatctctacaaaaaaattaaaaaattagctagacatggctgcatgtgcctgtagtaccagctactcaagaggctgaggtgggaggatcacttgagcccaggaggttgaggctgcagtgagcagtaattgtgccactgccctccagcctgagtgacagagtgagaccttgtcccaaaaaattaaattaaattaaattaaacgctttgcaaaaaaaaaaaactacccattaaatccgggttcctgggttatattagaagttccggccgggtgcagtggctcatgcctataatcccagcactttgggaggctgaggtgggtggatcacgaggtcaggagtttgagaccagcctgaccaacatagtgaaaccccgtctctactaaaaatacaaaaaattacccgggcgtggtggcacatgcctgtaatcccagctactcaggaggctgaggcaggagaattgcttgaatccaggaggcgaaggttgcagtgagccgagattgggccatggcactctagcctgggtgacagagcgagactctgtctcaaaaaaacaataaaaaaaagaagaagaagttctagggcacttaactactaatatctgggggggcattctttgcctcccctataaaatgtaaagggatcccaaatgttaaacttccacccccatcacctcgagttgtcatggaaaagagaatgttataccctgtttataccccacgtgtcctggggtgtagctagtgctttctagctgatcatgattctgaagataccttggaataggctgggaaacaggtaaaaatcagactgtgtgagtttgaaagagtgcaggaaaggtggcttctgggttatatccaagatgtgtcattgtggttccccgtggtgatcagaaaagcgagccagcttgctgtagtttggttgaccaatgtccatgcattctgaaattaaaataagctttgtgattactccttcactttatttagtagtagtcattgtgtaaatttgaaacaaccggagaagttgggcttagtgttgtttttatacatggcatattctagaccctgagggccaggtcagggtgaggtgagggagacacctcacctcctttaaacattatttaaaatgttgacattttgttcaccgtggattttttttgcattcattttggttttttaaaatattgcattaggccgggtgtggtggctcactcctgtaatcccagcactttgggaagccgaggcaggtggatcatttgaagtcaggagttcgacaccagcctggccaacatggtgaaaccctgtgtctactaaaaatacaaaaattagctgggtgtggtgtgcgtgtgtggtcccagctactcgagaggctgaggcaggataattgctttaaccggggagacagatgttgcagtgagtcaagatcgtgccactgcactccagcctgggcgacaagagtgacactccatctaaaaaaaaaaaaaaaaaaaaaaaagcataaacgtaatttatcttgattgctgaattttttgatggccccttacattgggtgctcaaagtgactgccttatctccccacaaaggaaaaacaaaacgcttgcatttttccctcaaaagactaaaaaatagaagccatcattaatttaaaataggattaagtgccaaaagttcagtgagaacacagcaggtctgggggtgtcaactctccatgccccaggtgtggaaacagtccccctctgcctgctagctttggccagccccctcccccgggaccctgtcctcatctccccccattaatcagccttcactttctgaagtctcacacctcctgcattcctcactgtttgccaagccttgataatggtcccctctgtgattggtatccccaaggcaggaccagagcccagagaggtgattaaggggcaggagatcccaggcttcagggacctgctccctgagttccttggagcccagtgttgtagtcctaattgctagagaccaaggccagcttgaaagatgtgatctgtgtccttcacttcttttgttcttttcttccccggtgctggcctaacctccttgcatgtggataaaaattcaatcccctcctcatggaggttgtccctcttgtttcacccccaaaatcctccagtttctgtctgccaagcagctagaaggagctttttttttttttttttttttttgagatggaatctagctctgtctcccagcctggagtgcagtggtgctatctcggctcactgcagcctctgcctcccgggttcaagcgatttttctgcctcagcttcccaagtagctgggattgcaggcacatgccaccacacccaactattttttgtatttttagtagagacggggtttcgccatgttagccagactggtctcggactcctgatttcaggtgatactaccacctcggcctcccaaggtgccgggattacaggtgtgagccaccacatccagccagaaggatctttctaaagggaaactctgaaaaatcatccctctacttaaaccttctgtttctcttaggatacagtatagactctagtgtgatcatcagggctgcgtggccaggtctatacttcatccccaaattcattctttgaccctatagcccaatgggctccctgctgtcccggcagtaaaccaagcacacccggaccccaggaaccttgcatctactcttttttttttcttcagagattggggcatgaaatcttccattcctctttgcattgctggtttgcattattgggggtattagaagacactggcttttggcaagaggagtctagattccaggtttggtgctaactgacaaagtatcttgcggcaggtagaaataatcagttttcttgcattttttccctcgaaagactaaaaaatggaagccatcattaatttaaaacaggattaagtgccaaaagttcagtgaaaacacagccacatctgtgttttctctgtgttagtatctcacacacaattccactccaaatacatccctgatgctgatgaaacgttatgtatataattgtatgttgtctacaaggtaaaccttaaaagtatgacaaatagaggttactatatgttcattgaatgtctttttttttttttgagagagagagagagagagaaataagatctcactctgtcacccatgctggagtgcagtggcatgatctcagctcactgcaaccttcacctcccaggttcaaacaattctcctgtgtcagactccctggaattacaggcgtgccaccatgcctggctaaattttttttgtgtttttagtacagacagggtttcgccatgttgcccaggatggtttcaaactcctggcctcaagtgacctgcccaccttggcctcccaaagttctggggttacaggcatgagccaccacgcctggccccttgcatctactcttgcttttgcctgtaatacccttcccccacctgctcgcacactcccttcggtcttcctgagggtcacctcctcagaaagctctttcctgacttctccacactcggtcaccacccctattacaagccctcatagcaactcacttaggtccctcagagcttttatcacaagttcccatatatattaattggtgcaattatttgtttatttatgtcttcctctttctagggcagacattgagatcgggatgtcttatctaattggttcaaccctgtcttcccagtggtgcctagaaaaatgcctggtacacagtaggtgctcaataaatgctttttgagtgaatacagcagggtttgtcattctgcgcccggctgacatttggggacagtggtgggggctgttctgtgcattgtaggatgttgagcagcgtcactgactttgacatactaggtgctgtaacatacatatcctctgcctcgtttcaaagaccaaaaattgtctctagaaatttccaaatgtgccctgggaaggggagcaaaatcaccattggcagagaagcatgggaatgcagagactgggctaatagagctccagctgcgtcttacccctcttggctcccttagaactttgctcatgggatggttcgttttatgtgtcaccttgactgggtcaaagggatgctcagagatctgattggatattatttctgggtatgtttatgaaggtgtttctggaagagatgaacatttggattggtgaactgagtaaaacaggtgggccttcccagtgtgagagggcatcctctaatctgtggagggtccgaatagaagaaaacagcagaggaggttggactcacattccctttgcctggcaatcttcttgctcttactgctcctggttctcaggccttcagacccaggttggactctacaccattcgttttcagctattggccgagtcaacactgtctttcctggttctcaccttgcacatggcatatcatgagacttttcagcctccataattatgtgagccaataccatatatatacatatatatataattttttttttagatggagtctcactctgtcacccaggctgcagtgcagtggcatactcttggctcactgcaacctccatctccccggttcaagtgattctcctgcctcagcctcctgagcagctgggattacaggcacccgccaccacgccccgctaatttttgtattttaagtggagatggggtttcgccatgttggccagactggtctgaaactcctgacctcaagtgatccacccactttggcctcccaaagtgctgggattacaggcgtgagccactgcacccggcccttataatatatatatatccatctaccttatctatctacctattcgttacctatttatcatctatctatctgtctatatcttattggttctgtttctatgaagagccctgactaatacaatccgtatcttggtcacagccctgatatttctctgtgtatcactgcaccaggtaacatgcaaatgcctcaaaagctgggaacagaaacaaacgcttgtctatatccccaaaattagcacaagtctggagacaaagaaggccacaaataattattaaactaatcttagcccaggtatggtggcttacgcctgtcctttattggttgggcgtggtggctcatgcctgtaatcccagcacttttggaggtcaaggcaggcagactgcttgagctggggatttcaagaccaaccttggcaacatggtgaaaccctgtctctacaaaaaatttcaaaaattagccagctgtggtggcacatgcctgtggtcctagattctcaagaagctgaggtgggagaattgcttgaggttgcagtgagccatgattgcaccactgcactccagcctgggcaacagagcaagaccctgtctcaaaaaaaacgaaacaaaacaaaaacaaatgacaacaaaaaacccaccaagcctgtcctttattaatgggtatatctaatgactttctgatattcaagcagaaacctttaggcagtgagagagaagccatgtggacatcttgtggggagaagggaattcctggtagtgggcacagcatgtgcaaaggtcctgaggtaggagcatatttggtgtgtttgagggacagtggggaggctagagcagagtgactgagggaaggagaaaagggaggtgaggtcagagaagcagcagcagggcccagatgtgtagggctttgttggcactgtaaaaacttcggatttctgtagtcccagcactttgggaggccgaggcgggcggatcacgaggtcaggagatcgagaccatcctggctaaaacggtgaaaccccgtctctactaaaaatacaaaaaattagccgggcgtagtggcgggcgcctgtagtcccagctacttgggaggctgaggcaggagaatggcgtgaacccgggaggcggagcttgcagtgagccgagatcccgccactgcactccagcctgggcaacagagcgagactccgtctcaaaaaaaaaaaaaacaaaacttcggatttccctgtaagtgagacggagtcattggaaggttcttagtagaggagatataatacaatgtacacctcctaggctcaagcaattctcaggcctcagcctccggagtagctgggattacaggcacacgccaccacgcctggctaacttttgtatttttagtagaaacagggtttcactatggtggccaggctggtcttgaactcctgacctcaagtgatccacctgcctcagcctcccaaagtgctttttcaatcataaatgtcactgctctaaacatccttttgtttacactgacatggaatgtctataagatgtcaatcaaattggtggaaattaggaggcaggatttcaacccaggtccttctcactcaaacacgactccccacacacacttacccactgccctggggggtaatgaggtttctttctcacaggaaatacataagtcaacattctggattgttcagtgttgtaggattaaattagtccactttaggaatatttgttaagaattgatatatcgtccaagtgccatgctgatgctggatgtgataatgtacgagatgatcaaacctcatgaccacatgcagctggcagcttaaaggatcacaataagttagcataagacatccagtgcccaactcatagtggatatccagcctctttccagggtctctatccatttggataccagcaggatcagaggccagtggggtcttttataaagaaaagaaaagaaaaaaagaaaaaaaagagagaaaagaagggaagggaagggaagggaggggagggaagggaacggaaaggaaaggagaaaagaaaggaatggaagggaagggaagggggagggaaggagaagggaagggaaagaggagggaaaggaaagggggagggagggagaagggggagggaagggggagggaaggagaagggaagggggagggaagggggagggaaggagaggcgaaggagaaaggaaggtgaagggaagggaaaagaaaagaaaaaaaagaaaagaaaagagaaaagacctgacttatgttcccgcccagatggctctgttgtcaggagaggggagcatcttagctcagtgcatagaagttactcaagaatttctacaagactaaaacttattttaaaatcatgaaggactgttgaatttgtagaaatattccatctgtgttccaaggatgcacgcttcagggtttgcagagggttgcaactgtcttcctgtgccacaaaagactctaaagatgctgagatgtttcatttgaagaaggaccagtcctccagaaattaggatcccactgtaaaaaggcaatgcttgaagtgttgaatggagaagacttggaatcagaaaagactgacattgaagcttggctcttccaagttggttggtctctgatgagccatgcatgttttgtgcctcagtttccccctctatcaaacagagggactgtgattatatctgctctcactcccaccttgtgaggcgctaatgatacaacatgcctggtgggtaacaagatgcatgaactgtagcacatattctgcaaagggagcttctctgagtttccaagttttgattgaaatcgtttcccacatcctcacttttcatgctaatgtgggatttttttttaaattttatcattattatactttaagttttagggtacatgtgcacaacgtgcaagtttgttacatatgtatacatgtgccatgttggtgtgctgcacccattaagtcatcatttagcattaggtatatctcctaaagctgtccctccccccattcccccaccccacaacagtccctggtgtgtgatgttccccttcctgtgtccatgtgttctcattgttcaattcccacctatgagtgagaacatgtggtgtttggttttttgtccttgcgatagtttgctgagaatgatggtttccagcttcatccatgtccctacaaaggacatgaactcatcattttttatggctgcatagtattccatggtgtatatgtgccacattttcttaatccagtctatcattgttggacatttgggttggttccaagtctttgctactgtgaatagtgctgcagtaaacatgtgtgcatgtgtctttatagcagcatgatttataatcctttgggtatatacccagtaatgggatggctgggtcaaatgatatttctagttctagatccctgaggaatcgccacactgactcccacaatggggaactagtttacagtcccaccaacagtgtaaaagtgttcctatttctccacatcctctccagcacctgttgtttcctgactttttagtgattgccattctaactggtgtgagatgatatctcattgtggtttccatttgcatttctctgatggccagtgatgacgagcattttttcatatgttttttggctgcataaatgtcttcttttgagaagtgtctgttcatatcctttgcccactttttgatgggattgtttgtttttttcttgtaaatttgtttgagttcattgtagattctggatattagccctttgtcagatgagtagattgcaaaaattttctcccattctgtaggttgcctgttcactctgatggtagtttcttttgctgtgcagaagctctttagtttaattagatcccatttgtcaattttggcttttgtaatatgggatgttttgactgtgggttgttttgactgcttgaatgatggagaattcacactttagaaaaaaatgatgcatagctcaaacacaggaagacctattgtcaataaatatataaatactatacagtagggtcaatcttaaatccctgcccattgggaagagaccatgaggtaaactttcttttttttttttttttttttttttgagatggagtctcagtctgtcacccaggctggagtgcagtggtgtgatctcagctcactgcaacctctgcctccatggttcaagctattctcctgtctcagcctcctgagtagctgggattacaggcacctgccaccacgcctggctaatttttatatttttagtagagatggggtttcagccatttgcccaggctgctcttgaactcctgacctcaggggatccacccaccttggcctcccaaagtgctgggattacaggcatgagccactgcgcctggccatgagataaactcatcctggggtctacactcaatgtccagattcaacagagagctcctggctggcccatgagccgtgtcaacttctaacacagcattcggtatctcacagtgtgacttttttccttgatccaaccatgaagacatctcagtctctccacaactattcaagactcacacttgaaattctaaggtttccttgatgtttaaagagagtctgtttattgctatttctaacttctattgcatagatctgtgcaatgctgaaatttagggtacttttctctcctctgctataatctggagtagccttacaaaatctgagttgtagctacctggtgcggcactcatagagagtggggcatgaaatcttccctctctctttgcattgctggtttgcattattgggggtattagatgaccctggcttttggcaagaggagtctagatggaggtttggtgctaactgacacagtttcttgcagcagatagaaataatcaaacctggttttctctgtgttagtatctcacacacacttccactccaaatacatccctgatgctgattaacctttgtgtttataattgtatgtcgtctacaaggtcccttgtaaaccttaaagcatgacaaatagaggttactatatgttcatggattgtctttcttttaggggggaagggatagggtctcactctgtcatccatgctagactgcagtggcacagtcatagttcactgtaagctcaaacttctggacttaggcagtaatcccagttcagtctcccaggtagctgggactacaggcatgtaccaccatgccaagctatttttttctaagtttttgtagatatgcagtcttgctatgttgtcaagtctagtcttgaactcctggcctcaagcaatcctcctgccttggcatcccaaggtgctggaattataagtgtgagccacagtgcttggctggaacgtaattttctttttttctttctttctttcttctttgagacagtctcactctgtcgcccaggctggagtgcagtggtgtgatctcagctcactgcaacctccacctaccgggtcaagcgattcttatgcctcagcctcccaagtagctagggttacaggcatgtgccaacatgcctggctaatttttgtatttttagtagagatggggtttcgccatgttagccatgctggtctcaaactcctgacctcaggtgatccgcctgcctcggcctcccaaagtgctgggattacaggcatgagtcaccacggaacgtaatttttaacaatagccttcggtaatccaatttagttgttcccagtgaatttctcctacatcattacatttttttctgggtagagtttactgaagaaggtcttcttcatggcgaccttcagctccttgttcctgaggctgaagatgatggggctgaggaagggtgtgaggaccgtgtaggtgatgcccatcaaggtgtctccttccagagactggggacttttgggcttcaggtaaatgacggaggcaaagccatagtgcacgaccaccacagtgaggtgagaggcacaggtggagaaggccttgttccgaccttcagcagaagggatcttcaagatggcggccacgatgaaggcataggagaggaggatgaggagaaaacagcccagcagggccgtgatacacaccaagcccacgcctttggccaccaccagcacatcgtctccacaggccaacttcaacagaggtggcacatggcaagcaaaatggtggatctccttgtgtccacagaaggcgaggtggaaaatggccgaggtcaccaccatccccatgaccaagccaccagcccaggagcagcccaccaggcaggcgcagccccgcgggctcatgagcacgttgtagcgcagggggtggcagatggccacgtagcggtcgtagcccatgacggtgagcaggaaggagtgggtgaagccgaagctgaaggagaagaacatctgactggcacaggccaggaaggcgatggagcgctgggtggacagcaggtcggccagcatgcgcgggatgatggccacggtgtagaggatctcggagacggagagggcgcacaggaagaggtacatgggcgtgtggaggctgcgctcgctccagacggtggccatgatgagcaggttgcccagcagcgtgaacaggtacatcagcaggaacagcaggaagagcatcagctggaggtgggggaagacagagaagccgacgaggatgaattgggtcactgtggagtgattggctctctgcatggaggctgtgcctggggtgagatgtgacagggagatgtcagttactgcatgaagaaaagttctcagccttccccatacctggatttgcccaagggactgctcttgataaatggtttggttccattcccactctgtacctcctataatttaatactctcgtcaacctagtgagaacggtactattttttcaacccccttttgaagtaccttgagcatagtcattgagaatattgaaatgtagagcttgctcaaggccaagctgttgaaacggtagatcagagactggaacccatagctgggctggctctaaaacctgtacccttcactatttctctatgttgccccctgcccccaaacgaaaatgctccaggctggcatggtggttcacatctgtaatcccagcactttggaggctaagggggaaggacggcttgagcccaagagtttgaggttgcagcaagctatgatggcaccactgtactccagcctgggtgacagagctagactctatctcttaaagaaagaagaaaatggccgggcacggtggctcacgcctataatcccaacactttgggaggctgaggcaggcggatcacgaggtcaagagatggaggccagcctggccaaaatggtgaaaccccatctctactaaaaatataaaaattagtcgggcatggtggcacgcacctgtagtcccagctcttcgggaggcagagacaggagaatctcttgaacctgggaggcggaggttgcagtaagccgagatggcgccactggactccaccctggcgacagagcgagtctctgtctcaaaaaaaaaaaaaataaataaataaaaagaagaagaagaaaaacatattcctttgctggaacttccattcattccttctctgccctcctactcccttctgataaatcacgttcatcccccagctccaggtatcatgagacgttcccacccatggctgcaactccttggaacagggcgcgtctctaaatctgaaccaaccagacttcctctggggttatccatgtaggaaagcagaggcaggagactgtgttgctctaaggaaggagccagaaatcatgctttggttgttttccagctcccatgaggtatgcctctatgttctgaggcaatgaaatgtagccatcagacagaaagaagggcgtgggaatcagcagggctcagttcaaatccctcctctggctgttgtgtaatgattatttatttatttatttatttatgtatttatttatttatttttgtagagacagagtttcattctgttccccagactggagtgcaatggtgcaatcatagttcactgcaacctcaaactcctggattcaagcaatcttcctacctcagcctcccaagtagctgggactacaggcacacaccacctcacccagctaatgttttattttttattatagagatggcatcttgctatgttgcccaggctggtctggaactccacccctcaagtcatcctcctgcctgggattcccaaagtgctggaattacagaagtgagccactgcatctggccaatattttgtaaagttgagcagattcctttatctctctgtacctccctacctcaaagggttgttgtgggaaggaaatgagcttttcttaagtgacctggcatgcagtagatgctacatatgataattaatacagtaaatgagtgactgtacatggtctttgctcagtaactttaatttcatgagatttctatgtgtctttatgaaacaattaaatatattcaattttttttttttcaaaagacagggtctggctctgtcacccaggctggagtgcagtggcacaattatcatagctcactgcagccttcggctcctgggcttaagcgatcttcccttctcagcccccttaaatagctgggactacaggcatgcaccaccatgcttagttaatctcttttttaaaaaatttggcaatgtgtgaccaggtgcagtggctcacgcctataatcccagcactttgggaggccaaggtgggcagatcacttgagatcaggagttcgagaccagcctgggcaacatggtgaaaccctgcctctactaaaaatacaaaaattagccaggcatggtggcacaggcctgtggtcccagctactcaagaggctgagttaggagaatcgcttgatctgggagatggaggttgcagtgagccaagatcacaccactgcactccaggctgggtgacagagcaagactccttctcaaaaaaaaaaaaaaaaaaaggagtaaactaccactctgctttctgtttctacggatgtgtctgttctgaacattttacataaatggaatcatacgagatggggccttttgtgtctcatttctttcactgaacataatgttttagggttcatttgcattgtagcatgcaattgtaacagtattaaaacaccacagcatgcgtctgagctttattcctgtttatggctgaacgattttccattttatgaatatgcgtcatcttttcatggacatgagggttgtgccccacctgttggccttcgtgaacaatgctgcaatgaaaatgcttgtagcatttggaacctatcagtggtttccaggggctggggtgaggggagaatggggagtgactgctaatagatacggtgtttccttttgggctaataaaaaattattacctttgtctggaactaggcaaaggtggtgttagtgcaacagcataaatgttcttgatgccactgaattgtatacttttaagtgtttatgtggaaatccagtaataaaaggcaaatgcagtgggctttctcaaaaataaaataaaataaaaataaagaaataaaataaaataaaaataaagaaaagaaaataaataaataaataggtaaatttcaggttgtatgtatgttattacaataaaaagatcattttagaaagggtagttcacttccctttaagtgggctcaggtcctcagtcaagccctggcagatttatagtgagagatgaaggaagaaccagctcctttggtgagcagaggctgcattctccaaacatcgttggtctccagagtttcttggtctctcttcctggaatcactctcgttttgccccacttctgggtcagtacttgcccgtagctccacagaatagtggcccccacagcaccaccatgtcccgccactctgagatcttagaggagtaaatgacttggaaacaagaacctccaagaagaggccaaatgggcgagattggtgccctggggtggtgctcacaaaccctctgtggctccccagtgcctaaggcagggtttctcaaccttgggactgttgatatttagggccaggtcattctttctgtggggagctgttctgtgtctcataacatgtttagtagcatccctggtctctgtcaactcaatgccagcagccattgctcagtcatgacaaccaaaaaatgtctccagaaaacacccatgtctccatggggctcaaagtcacccccagttgagaaccgctgatccagagagtgcagccgcaactccttcacaccctccctctgctgggatccccattcctccacttcttcacctggcaaacccctgtttgttgttaagattcagcttagatgtcacctcttccatgcagtcctcctggatatttcttcccaaggcatattaagccacccattcctgggtgctttcaaaataatgattcccagttaatggtaacagcaggcattggttcaattctcgctctgtgcctcctacaagtaactttaaagctccttgctcatgactttgttatgatgtttgccgtgatatgtcatgttggagctgtgtctatccctggaacctgattgtgaatccctgaagccaaggactgttgtgtctacagcaccagtgctgtgtactcaacaacaacaccgatgagagcagctgccctttactggatatgtcctacagaccaggcactgcactcacatcactcatgctattcttattgaatatttacccccacattagaagtcatctgctctgatccctattttacagacagggaaactgaaacccacgacacatcacttgccttaggtgccttgagtctgaagtgggggcccagggtctgagcttaggtctgattgatctcaaagcctgtcttttcctaacctcttgttatactcaccagttgctggtggctgtttcaaaggccactaggagatgctgcttccccatgactgaccgtctacacactcttgttcatatcaattcagatcacaagaatcgacagcgagtgagtgaacaaggtggggggagagagagagagagaaaaggaggaggaggaggaggaggaaaagaaagaaaaaagggaggaagaaagagagggagggagggaggaaggaaagaaggataaaaggaaggaaggatggggactgcaggaggaaggaaggagggagggagggaaggaggaaggaaggaacgaaggaaggaaggaaggagagtgagggaggaaaggaggagagtgaggaaggaagaaaggagggagggaggcaggaaggaaggagagtgagggaggaaagaaggagagtgaggaaggaaggaagaaagggagggagggaggcaggaaggaaggaaggagagtgagggaggaaagaaggagagtgagataggaagaaacgagggagggaggaatggagggaggaaggaagggagggagggagaaaccttgagaggacaggagccgatcacgtctgtaggaggtagctgagggctgcatgtaacaccgtctggaatgatgggatgcagaatgcagctaaaagggtagtccagtcattctggaaaaatcaaaaccatggagacagcaaaagatcagtggcttccaggggaccagtgggtgagagggagggatgaatgggtggggcacagagggtttttaagacagtgtaactatgttgtgtgatactgtcatggtagatacaggacattgtgcatttgtcaaaacccagagaatgtacagccccaagagtgaactctaatgtaactgtggatttcagtcaatgacaatgtgtcaacactggttcatcagttgtaacagattaatggtaaaaaaaaaaaaaaatcccagttgctaattataggggaaattgtgtgcaggcggagagagggtatatggagattctctgcagtatctatctgctctatgttctgtaaatctgaaactgctcttaaaataaagtctattaattttaaaaagtaaaacaaaaccaaacccatggtggatgtgggactaggatagcagcgaggaggatttagagcttctgggcattgattcaccagcagaacatccagtgggttcctctgtaggtaaaacagagagagagaaaggtaggaagagaaagagagagatggggatagagagagaggcaggggaagagagagagagagagagagagagaggaggcgagggagaaacagagagagagaggtggggagagaaagaaagagaggtggggagagagaaagagagagacagagaggtggagacacagagagatgtggggaaagagcacacacagagagagagagagatggagggagagagagaagtggggagatagagagtgggaggtggggggagagagagagagaaggacagggagaaagacacagagagaggtggggagagagaagtggggagagagacacagagagtgtgggaggtggggagagagagggttggggaaagagagagagagacagagagaagggtggggagagagagagaagtggagagagagggaggtgggaagagaaacagagagaggaaagagaggtagggagaaagagaggacagaggggaaagagaagaaaaaggtgagaagaaagagagagagcaagcaagcccactgtctagcactgacaggaacacccggtggggccagttctccactcagagactctagggctaagcgtggctgtggacaagtcctgccacagacatccctagagcagggtttcctgccttcagcattagggacgctaggggcgaatcattctctctcagaggggtgtcctgtgcactgcaggagactgagcagcattcttggtctccacccaccagatagataccagcagcactccccagtcacgacaatcagaaatgtccttatacgttgtcacgtgtctcctgggtgacagcatcactccatgggccaggcctgtcttgtctctgagaccccatctggccttaactctcacccatcctggctctctcttcttagtgaagctgtctggcctcccctctcttccacttaagccaccacttccctctcttttctctccatcttctcatccccagctcctaaccattccctcaccacctgctcccattgacgcctcccttgtgtgtgtgtgtgtgtgtgtgtgtgtgtgtgtgtgagagagagagagagagagagagagagagagagagagagagagagagagagagacagggtatccctctgtcacccaggctggagtgcagaggcacaatcacagctcactgcagccttaacttcctgggctcaagcaatcctcccacctcaatctctggagtagctacaggtgcctgccattcctggccaatttttgtatttttttgtacagacagggtctcactatgctgcccaggctggcctcaaactcttggactcaagtgatcctcccaccttggcctcccaaagtgctgggattgcaggcatgagccactgcacccggcccaccctgattctttacaccctggggtggtggctggagcttctgaaccctgaatcctctttctctcttttctccgcctcttcccaatcctttttccgtagacttcttgcctggacagaccgagaagagaggttaaaatcaaaccatcaccttgggtcacattgagcattggctgtcttctctctgcacctgttacctcccccatccaagggacctacctcatgaggcagcaggagctctaaagaaggcaagtcctggctgggcacgatggctcatgcctgtaatcccagtactttgggaagccgaggcgggtggatcacgagatcaggagttcaagaccagcctgtccagcatggtgaaacccctgtctctactaaaaatacaaaaaattagccaggcatggtggcacgcacctgtagtcccagctactcaggaggctgagggagaagaatcgcttgaacctggcaggcggaggttgcagtgagccgagattgcgccactgcactccagcctgggctacagagcgagattccgtctcaaaaaaaaaaaaaaaaaaatagaagaaggtaagtcctgctaagcaaacagcacactgactaagacgtggtgagtggcctctgcctgtcacccactgccctgtagactcacattgctaaaggagtaatataaacaggtggtttcttggagtccctggcaggtgctggttccccaggtctctcctggtcaggtggctgagaggggaggtgactcacctgggactccaggcatctgcttctgcttcatcccagtaggaggctctagtttggagtttctccacaggtgggagctgaccaggtgtgggctgcaccaagcagccacaccagctgagccgggggcttgactgagcccaaatgcgattatttatccctccctgactccctgcccaccggcttccctcgctgtggtcctactgtctctgtctccgctacagggatgctgggaccccagggaccctgccagagaggaggcaacctcagggaatctgtatcctcactttcccattccccccgcctgccaggggtgagtcaattccctgagcttgtcaagagcttgagcagagtctagtgctctacagatttggggtttgggcccatgactgttgaaattgacaggagggcagccctgccattgcccccagggactgcagaggctgccttgatatgccccgtcaccttcattcttctccaactgggtcatttgcccaactaaatgtcctttaaaataattttttaaaaccaacacacacacacgtatttgtttttatttttattttttgagacagggtctagctctgttgcccaggctggagtgcagtggtgtgattatggctcactgcagcctcaacctcccaggctcaaatgattctcctgcctcagcctcctgagcagctgggagtaaaggtgcttgccaccacacctgggctaagttttaatttttctgtagagatggggtctcgctttgttgcccaggctggtcttgagctccttggctcaagggatcctcccaccttgacctctcaaagtgctgggattacagctgtgagccaccatgcctggcctgtttcttcttattatgtaattgaaatgctacatacaaagcagcaaaccatgcaatggccagccaggcaatcgtgacggtgaatttaatgggtatcccttcagatcttcatgagcatgtaggatgtgaaaacaatgcaaacccataaaatcagagttctgttgtgcattattgttgctttcgcttcgttctgcttttgaggtgaaattcacataaaataatcaaccactttaaagtatacaattccctgggattgaatgcattcacaatgttgtgtggccgccgcctctgtctagttccaaaatgttttcatcacctaatacccattagcagccactcccctaccccacccagtccttcaaaaccaccaatttgttttctggctctggctctatggacttacctattctagacatttcatataaatgggactatatactactatatataacgatgcattatgattgcccctgtgagtagccacggcactccagccattttgtcaacacaaaaatgtcgacattgccaagactgagaaactttggtctgcataaactcacacagagttcactctaagacgctgagtgaaaaaccaagttacggaaagatatctacgggagaatcagatctgcattttaaaaacacacaaaatggtttgacagtttatcaaaaagttaacatagaaattatcaaaggactcagcaatttcactcctaggtatacacccaaaagaatggaaaaggattcaaacaaatccttggacatcaaatgtgcatagcagcactgttcacagtagccaaacggtattttttaatttttctgtagagagtaggatttcactttgtttctcaggctgctcttggaactcctgggcttaagcgattctcctgccttgacctcccaaagtgcttggattgcaggtgtgagccactggacatggcctgatccaaacgtctatcaatggcagatccaaatgtctattaataaataaatggataaacaaagtgtggtataatcatataatggctattattcagccacagaaaggaataacatcccagtccaggccacagtagagatgaacgttgaaaacatgtgctatgtgaaaggagctaggcttttaattttatggataattccatacaaatgatatctctttgatacactgatttcttttctttggagtatatacttaagtagtggcatttctggatcatatgatagctctatgtttagttttctgagaaaccgccatactattatccatagtggttgtattaatttactttcccaccaaaaaatcatgagggttcccttttctcagcatcctcccaggcattccttattgcctgtcttctggataaatgccatcttaactgggttgagacattatcttgtagtgttgatttgcatttctctcatgatcagtgaggttgagcatcttttaatatgcctgtttgccatgtgtatgtcttcttttcagaaatgtttattcagatctttggcccattttaaaatcagatcattaatttttttcctattgagttgtttgagccccttatgtatcctggttattaatcccctatcagatggatagtttgcaagtattttctcccattctgtgattgtctcttcactttgtttattttttatttacttttatttttttttattttttatttttgagatggagtctcgctctgtcgaccaggctggagcacagtggctcaatcttggctcaatgcaacctccacctcccgggttccagcaattctcctgcctcagcctcctgagtagctgggattatgggcacacgccaccatgcccagctagttttctgtatttttagtagaaatggagtttcaccatgttggccaggctggtctcgaacccctgacctcaggtgatcagcccacctcggccttccagagtgctgggattacaggcgtgagccaccacgcccagcccactttgtttattgtttcctttgctgtgcaggttgtaacgtgatgtgatcccagttacccatttttgctctcgttgtctatgcccgtagtcaagaaatttttgcccagaccaatgtcctggagagtttccctaatgttttattttagtagtttcatagtttggggtcttagatttaagtctttaatccattttgactttatttttttatgtggtgagagataggggtctagtttcattcttctgtacatggatatctggttttcccaggaccatttactgaagacagtgtcatttccccagtgtatgttcttggcatctttgtcttggaggaatttagatacactggagggacccgcagaaataagatatggcagcacgtatacaaattaaagccttaaaatttttggagagatttttcaaaatttggaatgatataaatataatgaagaactttgaacttagccatttctaacttatctgttccaggagcacataaacagactaatcgggattataaaacatgctcacactaagtaactaatatgcagacatttatggagcgacaactgtgtgcctggcaccaaggtacaaagataaatgaagctggaaaccttctcctgtggagtacacagtggcaggaaagacacaaatattaaagttaaaattatgtcacggtggcagggcacggtggctcacgcctgtaatcccagcactttgggaggccgaggcggatggatcatgaggtccggagttcgagaccagcctggccaacatggtgaaaccccgtttctactaaaaatacaaaaattagctgggcgcggtggcaggcacctgtaatcccagctacctgggaggctgaggcaggagaatcgcttgaacccaggaggcagaggttgcagtgagccaagatcgcaccactgcactctagcctgggtgatagagttagacttcatctcaaaaaaaaaaaaaatatgtcatggtgtgatcgatgttgagctagcaaggaggggtggcaggaccaggaaaagtccatcaaaattggtgatgggagtcataaggatgagtagacttcagccagtcagaagatcagagaaaaggtgctacaagtagacagaacagagtcttgaagatggcttcagagggatatggtggaacgagcctgaatgcagtctagtaagccagggacatgaggcaaggagaggacaaagatggaagagggtctggagaggtggccaaggacagcttaaggagacttggagggtggtcgaaggagctgtggcttcctcttgatgtctggagagtcaccagagggtttaaatccttgtaatcccagcactttgggaggccgaggcaggaggatcacttgaggccaggagttcaagaccagtctgggaaacataatgagacccccccatctctaccaacaattatttacaaattaaaaataaataaataaatcctatgagtgacatgttcagccacctgagggaggatgggatcgggggaggtgatgactgaacagcttcaaccaactcagaacagccagttgtcaacttctgaaaattgttgcaacctggttgttaaacacagctctgattaaaagtaaactgtatgaaattacagtgaaataaattaagggaatctaggagtgagctctgtcttctcacttctgtcatgattgaaaggttcatctatgactcttagcgttattttcagcacctaccaattgatggcaggtcttctgtaaatacagattataaggagattgattcttctatctgaaagtctcagaagttcttagagacaaataattttcttaaagattaagcaggtgagaaagtaatgaactctagaagcttaaagctgtaataactgcttaaaatgtatcacttcttaattatttcatatatattttaccattgtctgtgcttttgagtttatgactattgcacgtgtactgtggaaatactccatatactagtagcacatcagcaggcttcaacctttttggcaccagggaccagtttcatggaagataatttttccacggactggggttgggggatggttttgggatgattcaggcacatgacatttattgttgtgcactttatttctattattattacattgtaatatataatgaggtaattatacaactcaccatcatgtagaatcagtggaagccctgagcttgttttcctgcaactggactgtcccatctgagggtgatgggagacagtaatagatcatcaggcatgagattcccataaagagcacccaacccagattcctcgtgtgcacagttcacaatagggttcacgctcctataggaatctaataccagcatgccaccattgacccatctgacaggaggcggagctcaagtggtaatgctcaccccaccccaccccttccgccactctcctgctgtgtggcccagatctaacagccacagaccgctaccagctgggcgttttggggaacccctgtcttatgggacacaacaaaaccagtgctgaagaagaaaaataaccttggcgtcttcttcagttgtgagactattgtgaccgtgtctgtgggtgactgagctcttatgtagctgcagggattggagtaactgaggtcactcacactcatgacctgggttctgccactgcttcctccaccatctcacatcacagccgcttgggatctctgttgactcttcgaaagcatgggtggatgtggattcacaaagacattttccagccagaaggctcagagaggggacttaaactggaaaacttaggcctagaaatggccacaagactggcactgaaacggtatgccagtgctcaaggattaggatgcccccaaggaggtatcacttggggaaaaccgttgatgattatctctatggaattacagaaatgccaaatatataacccaagaaacttggtgtgcactcaatgacacagcatgggagggagacctcttacttctatccagatgtttgtgatgtatgggtatctttggccaccgggtgctcctaccatcaaaaagagcttcaagacaggcttgttggggccttgagtccttttaccctagtctttcagctcttgctaagaagaatcccagctaagtgtggtggctcacatctctaaacccagcactttgggaggccaaggcaggcggatcacttgaggccaggagtttgagaccagcctggccaacatggtgaaacaccgtctctaccataaatacaaaaaatagccggccgtggtgacacgcgcttgtaatcccagctatttgggaggctgaggaaggagaatcacttgaacctgggaggcaaaggctgcagtgagctgagatcgtgccactgcactccagcctggatgacaagagtgagaccttgccacacacacacacacacacacacacacacaaaactgaaatgattgtaggtgctcccacagtgcctacacacattgggtttctctccagaatgagatcttccatgtattcgaaatgaactgggagagtcaaaggttttcctacccaccttgcatttgtaaggtccatctccactatgcattttcacatctttgaaggtttgggggggaagtgaatgttttctgaaattcctaacattcatagaggttttctccactgtgaggcctttcgtgtatgtgaaaggagtggtgaaaacgaaaggcattcccacatggcttacatgtatatgccttctgtctacattcctgatattcacagggtttgcgtccaaggcgatctctgatgtgcctttcagtggatggatagcccacgccgacctctccacacacatggctttcaggtggctttactccaggaggcgttttcttattcagattatgacctggaatctggctgaaggcttctccacattgactaccttctttattttcacagggtctctctaccatatgatttctgtacaaaataagtacattattaagtatttttataaataatttatttgttattgatgggtattggatttatgtggagttttttggagacagggtctcactcactctgttgccaggctggagtgcagtggtgcgatctcagctcactgcaacctccgcctcccaggttcaagcgattctcctgcctcagcctcctaagtagctgggattacaggcacccgccaccacacctggctaatttttgtatttttagtagattcggggtttcaccatgttggccaggctggtctcaaactcctgacctcaagtgatccacctgcctcaacctcctggatttatgtttttaacatcatcagtggaagcataggtaggatttctaacctgtttccactgtttggccatgaatggattgaatggtctgcaggagcgcccaactacagctgctatgaaaatagaaatattaacatggggtttcttcttcttttttttttaagacagggtctagctctgtcacccaggctggagtgcaatggcacaatcttggctcactgcaacctctacctcccaggctcaagcaatcctcccacctcagcctcccaagtaagggggacttataggtgtgtgctggcacacctagctaatttttttttttttttggtagagaatagatctccttatgttgcccaggctggtctcaagctcctgacctcaagcaatccacccttcttggcttcccaaagtgctgggattataggtgtgagccactgcacctagcctatatgtggtttcataatagtgtttccatgtaaactttttttgcaaacatatatatgtctcatttaagtatatatttatagagaaagttttctaagaataaacagattgaaactgggcttgtttttagaatttcctgacagtctacgattctcttgatggacactgctttctcttgaaaattaccttaaatttctcccaggattttggtacagatcttcaatgttcttatctccccatttctttcctaaaatgcaggtagagaaaaatcattatgaattattacaaaattattttaaaattattgaattctaggttcatggtacaccatgaccatggtacactggactgcaatggcacaatcttggctcactgccacttctacctcccaggctcaagcaatcctcccacctcagcctcccaagttagggggggctacaagtgtgtgccagcacaccagctaatttttttgcctatatatttatcaaagtatttcttttctacattccaaatcattgagcagctcaattgatgagtaagaaagacttgttctctaaatgactaagaaaagaaatgttgtcacccttaactacagaggccagcatcctgatggtttcccgcatcacatctctgtagagtttcgtctgggaaggacccagcaaagcccactcctgtagggtgaagttgaaagccacatcctcaaaggctggagtcctgaagcatccacatgtgtagaaaaggatggtgagactgacagccctgggtatctgtacttaccacataataagttcacatgattccatgttctccaaacatttcttctatgacttggttatcacacctcttacgctgtgtatacttacttcctctcacatagcaattccgatgctagaattatttggtaaagcaaccatgaaacacaaatacagctctccttggtgggtccagggagtaggatgtactgcctgggtcaccctaatttctcttcacacagtgggtctatagcacctgtcataaaagtcctcctaccacctagtgtgcagaagagacttaacattaggagtcctgaaactctgtatccttagaaatgtttgttcacaaagtttgatctttgataacatatgggatatgaaatttggatgggataccatgaacccaactgataaaagagtcgtataatttcctaaaactgaaaccaataagcaaaaacctctttggaagcagtaaaatttaggaaaacctaaattttaattgacgaattgctggagatagtgtggacaatttgagagttaaaaatgccaggaggcccagacctaaggggtccccactaattagtgacatgcacctccagaaatcctaccagctcttccagtgaagatgagagaaaaactgcttcctgcttttggcagaagatgtgaaagattagccattttgaaatatgcccagagaatgctattcttcttaacatctcctgccttcaaaagaaactatttcccaaagcctaccaactgggatgctggcagagctgacctcctgaagcaagagaaatacccaattccacccacttcaatctccctgccacaactagggaagggtgagaatgagaagtacttaagaaagctacaacccagaaacacaggattccaaaaaatgaggccaaagcataggtcaatggaatgcttccccacaccccacaccttactgccacttcaagagggcttctgtattacaacagcagaaaacaagtgagacagctgcatgccttatgccacatttacgaagtcactacgggcacacatacaagctgaacaacattgatgaagttggcatatttctagaaacacacaacataggactaagtcataaagaaagaaaaaattgggccaggcgcagtggctcatgcctgtaatcccagcacttcgggaggctgaggcaggcggatcacaagtcaggacatcgagactatcctggctaacacggtgaaaccccgtctctactaaaaatacaaaaaaattagctgggcgtggtgtcgggcgcctgtagtcccagctactcgggaggctgaggcaggagaatggcatgaaccctggaggcggagcttgcagtgagccaagatcgcaccactgcactccagcctgggagacagagcaagactccgtctcaaaaaaaagaaagaaaaaattggagcagatctacaactaataaggagattgatgcagtaatcaaaacccctcaactcacaaaagcccagcaccatacagtttcagcgatgaaacagaccaaacacttcaggaagattaacaccaattctcctcaaactcttccaaaaactttaggaggtaggaacatatcctagtttattccttgaggccctgaaattgtgctgacaataaagacaatgatacaatatttgatttgcaaatatcccttatgattattgacgcaacaatcctcaaataaatactccaaggtacaggaatcaaaacagtgtggtactggcctaaagacagagatatacatcactggaatagatacaggggccaagaaagatacccatatatatatggtaaagtgatttttgacaagaatgcttagataatgcaatggaaaaaggctgctctattttaaaaaatggtgctgggaaaactggatagccacatgtgaaaaaataaagttggacccataatttatataacatagaaaaatgaaataaaaatggattaaagacttaaagggaccagctcaaaccaaacaactcttagaagaaagtgttaaacaaaacttatgagaggccactgttttggactgagctcctgcactaggccccagcagaccagaacaaaccaaaatggagtcactcaggctaagtaccacataatcaaactgaacctttaaggaaggaggcaaatcctcaaatgcaccagtttttcctgagagcaggagagtcacagcaaccaataaaaaaaacaaaaataaaacccagccaacctgagctggcataatatataataaggccgcttacaaaaaaggaacctaatgattttttaaattgttctgttttgttgttcctcttacaagaatcacctattccattatacaaagcaggagttcttattctattttatagaatgggatgcttcttcggttcaggaattgcgaataaaagctaagtagatctttaaatttgttttaattttttttaaacctaaggcaaatgtttaacccacccttagccaaaatacaaggccttctttatttccctccgaagaagaggcagaccttaggataaagctttcttctggtctctgtcatctccctgccaaccaccaccaccaccaccatcaccttctctctaatcttgtttgctcctccctgtgaaagaatcattcctaacctttgaggtgttttttctttttctttcttttttttttttttttttttttttttgagactgagtcttgctctatcgcccaggctggaggcagtgacgtcgtgatctcaggtcactccaacctctgcccgccctgggattcaagcaattctcctgcctcagcctcctgagtagctgggattacaggtttctgccaccacgcccagctaatttttgtatttttagtagagacagagttttgccatgttactcaggctggtcttgaactcctgacttcaagtgatctacccgtcttggcctcccaaagagctgggattacaggcgtgagccaccacgcccagctgagatgctttttcaagagtcgccttaacatgaagtcactgtgtgagggtttcggctctcgagtcaagataattcacttacttttaaaagaaaatactcagcgtttgaagaaaccaacaaaatccctcaaactcagtgtccatatagataggcagggaagacaaattgtaaggcgcttgtattttatatagctcaacaagagaagcacaagtatctatccctttcagacaacaaagatgtgccatttaattattatttccatgacaatacacagttgaataaatcattatatttgaatgcttcttggtgttgccaagtcctgacccacagggttttgtattaatctctgaagtccaggtaccaggaaagagaagagttattcaccgtcacaagttctcactctggaaaggagaaaaatggatgttttaatgaatctttgtaatttaccaatttaactatgacactttattgtggaaatgtattcatttcgctgcagccataatggaagagtgattttccttactttgctgagattctcagccccagtagccttctcaaggctaagccctggaattccatttgaaatcacccaaaagaaaagaacaaatatgagaaatgtatcacacgccatctgggtaagacaaaatgtaaattaaaagctttatcggatgatgggtggctcatgcctgtaatccgagcactttgggaggccagccggtggatcatttgaggtcagaagttcgagaccagcctggcaaacatggtgaaacaccatctctactaaaaatacaaaaattagccaggtgtggtggcaggtgcctgtaatcccagctactccggaggctgaggcaggagaatcacttgaacctgggaggcggaggttgcagtgagccgagatggcaccactgtactccaggctgggcaacagatcaagactctgtctcaaaaaaaaaaaaaattaatggatgaaatataaggctagacatttcttttcttttttcttttttttctgaaatacacctctttcttgcctccttggatatattctatcttgtctatcaaactctactaataaaatccatttgatatttaattttttaaaaactgaggttcaggctgggtgcagtggctcacacctgtaatcccagcactttgggagtttgaggcaggaagatcgcttgagcccgggagtttgaggtcagcctaggcaatgtagtgagaccctgactctattataagtaagtaagtgaaaaaaaaattttcaaggtgacaaacccagggaggggtagggcaaactggaataccggcaagtctgactcaagtgtcagatcaggtcatcctatataacctcagacatgccccaaaccctgtgctgctcacatatatactcagtgaccaccctcccagaagacactgcattgtgtgcgtttcagctttttgcgtcacctcagtgaaggtggttttcctgtccttagccatagttttctcccttcactaggctaagaggattcaaaggacagggatcattccagtcttttcccttcaatagcagcatctgagtggctgaccagagaggtatttccaagaagtgaaaactgggcttggggtgagaaaagctaaatgtcctaaggggtttccttttagatgacggagggagataccaggggactcctccctcccgggaggtagggggagggggtgcacccggcggctcccctgagaggccccacaggcacatctcaggctgtcctctgggaagaaatgacccaggagctgatattcatgaccctccaagagacccggcagcttgtgggcatctcagatgagccccaggcagttctgaaacccaggaccaggaaaagataagagggtgggctgaggtcacatcaccctgtaacgtttccaaaagggaactgtcaggcctctgagccgaagctcagccattgtaacccctgtgacctgcacatatatgtccaggtggcctacaggagccaagaagtctggagcagctgaaaaacaaggaagtgaaacagccaattcctgccttaactaattaacccaccttacgacattccaccattatgacgtgttcctgccctgccccaactgatcaatcgaccctgtgacattcttctggacaatgagtcccatcatctctccaccatgcaccttgtgactccctcctctgctgacaacagataaccacctttaactgtaactttccacagcctaccccagccctataaagctgcccctctcctatctcccttcgctgactctcttttcagactcagcccacttgcacccaagtgaattaacagccttgttgctcacacaaagcctgtttaggtggtcttctatacggacatgcttgacacttggtgccaaaatctgggccagggggactccttcgtgagaccggccccctgtcctggccctcattccgtgaagagatccacctgcgacctcgggtcctcagaccagcccaaggaacatctcaccaatttcaaatcgggtaagtggtctcttcactcttttctccagcctctgtcgctaccctccaatctccctgtccagtctttttcttctctagtagagacaaaggagacacattttatccgtggacccaaaactctggcgctggtcacagactcaggaagacagtcttcccttggtgtctaatcactgcggggacgcctgcctaattattcacccacattccactggtgtctgatcaccttggggatgcctgccttggtcattcacccacattcccatggtggcaagtcatttgcggggacgcctgctttggctgctcacccccgcccttctccgtgtctctacttctctctttaaacttacctccttcactttgggcaatcttccgccctccattcctccctcttcccccttagcctgtgtacttaaaaacttctcttaaactaacacctgatataaaactcaaacgtcttattttcttctgcaatactgcttggccgcaatataaacttgacaatggttccaagtggccagaaaacggcacttttgatttctccatcctacaagacctagatcatttttgtcaaaaaatgggcacatggtctgaggtgccttgcgtccaggcattttttacacttcgctccctcccaagcctctgctcccaatgtgactcatcccaaatttttcttctttctctcccgtccgttccttcagtctctaccccaacctcagagtcccctgaatcccccttttctgcagacccctctgacctctctccccctccccaggccactccttggcaggctgaatcaagtcccaattcttcctcagcctccgctcccccatcttataattcttctatcacctcccctcctcaaacttggtcaggcttagtttcattccatgactagctctcccccacctgcccaacaatttcctcatagagaggtggctggagctgagggcacagtaaaggttcatatacctttttctctatcagacctttcccaatcagtcagcgtctgggctctttctcatcagaccccactaaatatacacaggaattccaatatttgactcagtcctacactttaacctgcagtgacctaaatgtcatcctgacctctaccctctccccagatgagcaggaaagagtttataccctagcccaatctcacgctaacacccgccggcatcatgagccagacctccaagaaggcatcagggcagttccctgagaggatccttgatgggaataccagacaggctccccaggtatagctaggcgagattacatggtctcttgcctagctgaagggctgaaaaaggcagcatacaaagctgttaattatgacaagctttaagaagccacccaaggtaaagatgaaaatccagcccagttcatggcccgtttggtggctacccttagaaactttacagccctagaccctgaagggccagaaggccatcttattctcaatatgcattttatcactcagtcagctcctgacattacaaaaaaagcttcaaaaattggaatctggccctcaaaccccacaacaggaattaatcaatctcgccttcaaggtgttcaacaatagagaagaggcagccaagcagcaacgtctttcagagctgcaattgcttgcctctgctgtaagacaaaccccagccatgccttcagcacacaaaaacttcagagcaaccaaaccacagcctctaggcactcctttaaaaccatctcatggaccttgcttcaagtgccgcaaaactggccactgggccaaggaatgcctgcagcccgggattcctcctaagcctgtcccacctgtgcgggaccccactggaaatcggactgtccaactaatatcacagccccttctagggtccctggagctctggctcaaagctctctggctgactccttcccagatctcctcggcttagtggctgaagactgatgctgcccgatcgcctcagaagccccttggaccatcacagatgccgagcttcgggtaactcttacggtggagggtaagtccatcccctttttaatcaatacgggggctacccaccccacattaccttcttttcaagggcctgtttcctttgcccccgtaactgccgtgggtattgacggccaagcttctaaaccccttaaaactccccaactctggtgccaacttggacaacattcttttatgcactcctttttagttaaccccacctgcccagttcccttattaggctgagatattttaaccacattatctgcttccctgactattgctgggctacagccacaccccattgctgtccttttccccaattcaaggcctctttcgcatcctccccttgtatctccccaccttaatcctcaagtataggatacttctactctttctttggcaactgaccatgcactccttaccattccattaaaacctaatcacccttaccctgctcaataccagtatcccagcccgcagcaggctttaaagggaactgaagcctgttatcacttgcctgttacaacgtggccttttgaagcctacaaattctccttacaactcccctatcctacccatccagaaaccggacaagtcctagaggctagttcaagaccttcacctcataaatcagattgtccttcccatccatcctgttgtgccaaaccctatactctcctctcctcgacacccccttccacaactcattattctgttatccacctcaaagatgccttctttaccatccccttgcatccctcctcccaacctcttttcacctttacttggactgaccctgacacccaccagtcccagcaattcacctggattgtccgaccccaaagtttcagggacagcccacactactttggtcaggccctctctcatgactttctttctgcccatctgcctcccaccttattcaatatgttgaagaccttcttctttgcagcccttcttaccaatcttcccagcaggacactatcctatcctacttcttcaatatctctactcaaaggggtactgagtatccccctctaaagctcatatttcctcccctagtgttacatatctcgacatagtcctccatcaacatacacgcactcttcctgcagactgtgttcagttaatctcccagaccctattccccaccaccaaacaacaactcctttccttcttaggcgttgttggatacttccgactctgggtaccaaggttttgccattctaaccaaactgctttacaaactcactaaaggtaatttagctgatcccatagaccataagtcctttccccatgcttcctttcattctctcaaaaaggccctagaaacagctcccacactagcactccctgacttgtcccaacctttttccttacacacagctgaaacacaaggctgtgctgctggagttctcacacaggagccaggcccacgacctatagcctttctatccaaacaacttgacctcacaattctaggctggccctcatgtctacatgtggtggcagctgccgctttaacacttccagagtctctcaaaatcacaggctatgctccacttaccctctacagttctcacaaccttcaagcattaatatcctcctcacacctttcacacttgctgtctgcccctcgacatctccagctctattcactctttattgaaaccccaacaataactactgcccatgggcccgatttcaacccagcttctcacttagcacccaacacaagtcctggccaacatgattgtatctccctaatacacatagcatcttccccctttcctcatatttctatttttccaatcccaaatccagaccacacttggtttattcatggcagttcctctaaacccagtcaaatctcgccagctaaagctggttatgctgtcgtgtcccatacctctattattgaggctgctgcacttcctccctccactacttcccaacaagccaaactgattgctttaacttgtgcactctctgtcgccaaaggaatgcacattaaaatttatattgactcctaatatgctttccacatcctccacaaccatgctaccctttggactgaaagaggttttctcaccacacaaggctcttccattatcaatacctctctaataaaggccctccttaatgctgctctcttgctggccaaagctgggttcattcattgtaaaggacaccagaaaccaactgatcttattgctaaaggaaatgcctacgccaacaggacagcaaaagaaacagcaaatgcctccacgcctgcaaatattctagccctcaccccaaaaggctagtacttttctttcttctctatcacccccacctactcctcttctaaaaaacctgctctaccagtcttttccaactcagggcaagtggttcttagatcatggaaaattcgttcttcctgcctcacaagcccagtctactctctcttcccttcatgaccatttccatataggatataagcctctggctggcctcctacagcccctcatttccatcccatcatggaaatccatccttaaaaccatcacctctcaatgctctgtctgccatgccaccaacccccgaggtcttctcaggcctcctccttttcctacgcatcaggctcatggatttcctccgacacaagattggcaaattgactttattcatatgccgcgtgtctgtaaatttaaatatctcctggtttgggccaataccttcaccggatgggtcgaggcctttcccactagctctgaaaggctactacagtcatttcttcccttctgacagatataatcccccaatttggcctccctacttccacagtttctcaggctcttggtattcagtggaaacttcataccccctaccgtcctcaatcttcaggaaaggtagaacggatgaatggtcttttaaaaacacacctcaccaagctcagcctccaacttaaaaaggactggacagtacttttaccacttgccctcctcagaattagggcctgtccttgagaagccacagggtacaacccatttcaattttatatggatgcaccttcttactcagccacaatcttgttccagacaccagccccctgggcaactatcttccagtcctctagcaggctagacaggaaatttgccaagctgctaatcttctcttgcctactccagattcccagccatatgaagacaccctagctggacgatcagtccttgtcaaaagtctgacccctcaaactctacagcctcaatggaccagaccctacccggtcatttatagcacaccaactgccgtccatctgcaggaccctctccattgggttcaccattccagaataaagccatgcccatcagacagccagcttgatctctcctcttcctcctggaagccacaagattaggccgagagccgatcagacaaacaacctacaacccttaagctcctggcagcgcccagccaaggccatgcttccttgcaacactccttccaaatggccatcccagcatgcttccaagcaggcttcatccgttcctctggaccctcatctcttaagacctgccgcctataaaaaggattatatcttgagaccctatcctctaaaattttttccacacccaaaacaaaaaatctctgggtcaaaagtctaaaacgcttaggctggcaaccatcagatccttgcccatggtgtcctcaagcctactctcatgaaatggacaacagtacacgcatatggggccagttccacatatttggcaaccagaccagcatccaggacaacacaaagtatgttgtttgttgttagagggcttgggacatttcactctttgccagcctcagcttaatccaggagacaaagattattttccttattatctcttctgcataggatctgcaatcagaactattgaacttctccattcagaccgccactcacacctatgggaaaagggtaatgtatcatcggcttagcaacagggaatactattcgtatgatggaaaatggggacaaaaggctttggtacataaaacattattccttccttggcctaaaaactcatcgccacctacattaaagctaatatgcctgattactgtttttagagaacttattttattagggcagttccaagctcaaaaatacgctaactggcaccttgttagctacataaaaatgcaccctagacccgaaacttactagactcattataaaattttctttaaggtgtccacgcagtccctggtcacacttgaagcagtccggagaaatatcagccctaccccagtaatccccagaaggaacttacacttttttttaatcttttcctacaacttcatattttataaataaaaagacaaaaatgtcaggcctgtgagctgaagcttagccattgtaacccctgtgacctgcacatatccgtccaggtggcctgcaggagccaagaagtctggagcagccgaaaaaccacaaagaagtgaaacagccagttcctgccttaactaattaacccaccttacgacattccaccattatgacttgtccaccattatgacttgttcctgccctgccccaactgatcaatcaaccctgtgacattcttctcctggacaatgagtcccatcatctctccaccatgcaccttgtgaccccctcctctgctgaggataaccacctttaactgtaactttccacgcctacccaagccctataaagctgcccctctcctatctcccttcactgactctcttttcggactcagcccacttgcacccaagtgaattaacagccttgttgctcacacaaagcctgattgggtgtcttctatacggacacgcgtgacaggaacctcaacccaaaggcagtctgatgaggtgtctaagataaaagtagcggcacaaaggcttttgtaaacagaggcgtttcatgtggttttcctttcctttccttatatgtgaaaaggtgacagaaaagaaatcttcctaaaagagtcagccactgctctgtggaacgatgatcatttaaatgccacgtcgatttgaaacgtacaacaaagggactaacagttgagaaccatgtggattgcagtggagacgctggcgttagagaatgcggggagggaaacgttcattacaagatttacggccagcccaagggggagcgaggctgggggaccgggtcgcggagacccggcttcgcacaccttttggaagactcagggagaagcgggggccgccttcggggggaaaggcgggactggggagcccacaggccatggctcctcccacaggatccccaggccggaggcgggatccccccatgatcctcccgtggcccccgcacaatctggggagatgcggagctgcccagagagggctctggggcgacagtcactgcgcagggacaggacaggactcccggagtcccagctgccggcccagccccaccctgcggccgagaggaccgagggccgagctgctccaggggaactcgggtcccagaccccggagtcgcagcggacaggcccgggtcccgccacagccagatccggctggttccaccagctcctcctccggtctcgggacgtccggccccgcacactcagcatttccggcttccgggtgtcccggcgtcctcccctgggcctgctcacgtcgcagaggggcggcgacggggattagaggggaggagggcctgcgcgagcagcaaagaccccaaaccccaaaaaacaaagaaaccgccagaaactgaagcttccacagcccgccacgtcccccggctacggctacgctcctgattggatagttagtacggcccctagtgcccctgattggataccgcttcaggtcccgccccctggggttagaaagacaggagacccgagaagacacttggctgcgtggagcccaaatgggcggttcctggcaactgggcttgttgtcttcctcgtgtcaggatgtaaaaagaaaagtagaggttcttcttcaaagacttccttcttcatctaattaagaataaatagtgtttgaaatgcttggtttttggtgccataaagaaatagcactttaacattaatttatttagcaaggccatttttactccctgcagaaagggtacactcgccagcagttttgccacgagcgtacaccgagcaaaggagacagggtcatttataacctgaggtgtccaccctactgctgtgtccagtttccattggctggaacgggacctcacattctgtgtttgtcctgattggctagcaacttagaacgttttaaaagaggcaaaggtggaggagaacaaaggaagaaggaagtaacttgtggaatgctgagaaaggtaaaaacaccttcaaataaggaagaggaagaggctatgacttaatgcttgcttggaccagtataagcataccagggcaaatatttgggctaaattgtgggagctaagaacataaagtatattgatttctttattatggctagcagatatttaagaatgttagcacaggtctttgaataaattttgcttttaagagaagttactatttattcctaatcgaatgggaaggaaaatttttgaagaggaacctctactttactttttacaaacaataacttgttttagaagcaacatttatttaaagacttgtactaatattcttaaatatttgctagctgtaataaagaaatcaatgtactttatgttcctagcttttacattttagcttaaatatttgctttggcatgcttatactagtctaaccaagtattaggtcgtagcttgttctttatttgaaggtgtttttacttttcttagcgttctacaagttacttctttcttttgttttcttctgcttttgcctttttaaaaaaagttctaagttgctagctgattgggataaatacagagtgtgaggtcttgttccagctaatggtaactggacacagcagtagggtagacgcgtcaagttgtaaatgaccttgtctcttttgttcagtgtactctcgtggcaaaaactgctagcaagtgtatcttttctgcggaaagtaagaaactggccttgctgaagaaattaaattcatgttcaagtgctattctttacagcgcccgagaacaagcatttcaaacaaggacctctggggattgggggtgggggtggggtgacatttgcaagtggacactggcattcatcagtactcactgggcccttcctctttcttcctcctggactaggggaaattccacacagtgttgtccatcaagaaaaatgcccagacaaggctcaatcattttaggaggtttatttgccaaagttaaggacatgcacccctgacacagcctcaggaagttctgacatgtgcccaaggtggtcagggaacagtttggttttatacattttagggagacatgagacatcagtcaatatatataaggagtatttggttctatccagaaagatggggacaattcgaagcagggagagggcttccaggtcacggagagacaagtggttgccttctcctgagtttccaatatgcctttccaaaggaggcaatcagaatatgcgtctatctcagtgagctggagggatgacttcgaatagaatggaaggcaggtttgtcctgagcagttcccagcttgaattttccctttagctcagtgattttgggggcccagtggagccaaggatcccgtggcgtcagagcaggaggggaggccaggccaggcaagactggaacaggagggaggacctttggggtgaggctgttggcaacgaaagtaagggtttctcataccttatcattcaatctattccttttcatacaagaagataaagacacagcagcaagaacaattattaaatgcatgaaaaaaacagagttatatgacagcaatattccataaaggaatcaaaacacaaaaaggcaaaaaatgagcttgttcagataagcagggtgccacacccacagttcaaaaagaaaatcgccttcaaggggttaaacttattcccaagcttgagagccatgttctgctgaagtggagacccagggtggaccagaccaggggtgacgaggcagggaaacctaaggatttaactctgtcagcctaccatgttctcttgccccattctcacagtgtggaaatgcttccctccttcaatgccttggtttttgccaacagaaaattctcacaaggagttgttacaggagaggggtcctgatccagaccccaagagagggttcttggatctcacacaagaaaaaattcagagtgagtccctaagctgaaagcaagttcatttaaaaagtagaggaataagggctgggcatggtggctcatgcctgtaatcccagcacttagggaggccgaggcagacaggtcacctgaggtcaggagttcaagaccagcctgactaacatctagtgaaactctgtctctactaaaaatacaaaaattagcttggcataggggtgcacgcctgcaatcccagctacttgggaagctgaggcaggagaatcgcttgaatccaggaggatgaagttgcagtgagccgagatagcgccactgcactccagtctgggtgacagagtgagactctgtctctcaaaaaaaaaaaataaaataaaggaataaaagaatggctactccatagacagagcagtcccaagggctgctggtggcccatttttatggttatttcttgatgatatgctaaacaagcggtagattattcatgcctcccctttttagaccatatatggtaacttcctgacgttgctatggcatttgtaaactgtcatggggctgttgggagtgtagcagtggggaccaccagaggccactctcgtcaccatcttggttttggtgggttttggccagcttctttactgcaacctgttttatcagcaagctctttatgacctgtatcttgtgccaacgtcctatctcatccaatgacttagaatgccttaaccacctgggaatgcagcccagtaggtctcagcctcattttacccagctcctattcaagaaggagttgctctggttcacatgcctctgacagactcattttaagattcagacctgaataaactgtcaaattcaaaaactgttgttactggaaaggtgtctccatccaaaccccaagagagggtgcttggaccttgtgcaagaaagaattcagagcaagtccataaagtgaaagcaagtttattaagaaagcaaaaggatgggccgggcccagtggctcacgcctgtaaatcccagcactttgggaggcagaggcgggcagatcacaaggtcaagagatcgagaccagcctggccaacatggtgaaaccccatctgtactaaaaatacaaaaattagctgggcatggtggtgcacgcctgtaatcccagctactcgggaggctgaggctggagatcgcttgaacccgggaggtagaggtttcagtgagccaagatcgtgccactgcactccagcctagagacagagcgacactctgtctcaaaaaaaaaaaaaaaagaaagcaaaaggatgaaacagtggctactccataggcagagcagcccgagagctgctagttggctatttttatagttatttcttgattatatgctaaccaaggggtggattattcatgagttttctggggaaatgggtgggcaattcccagaataagtgttcctcccctttttagaccatatagggtatcttcctgacgttgccatggcatttgtaatctgtcatggtgctggtgggagtgtcttttagcatgctaatgcattataattaatgcataatgagcagtgaggccaaccagaggtcactttggtcaccatcttggttttagtgggttttggctggcagctttttttttttttttttttttgagatggagtcttgctctgtcgcccaggctggagtgcagtggcaccatctcagttcactgcaacctccacctcccgggttcaagcgattctcctgcctcagcctcctcagtagctgagactacaggcacgcgccaccacgcctagctaacttctgtatttttagtagcgatagggtttggccattttggccagtctgatctcaaactcctgacctcagggatcttactgcctcagcctcccaaagtgctgggattacaggcatgagccaccgcacccggccaaaacaagtataactaatttatacattctattacttgatgtgttttttaccctctggatgctgctatcatttttctttctttctttctttctttttcttttttttttgtttttgagacataggctcgctctgtcacccaggctggagtgcagtgatgttatcgtggctcactgcaacctccgcctcccaagttcaagtgattctcatgcctcagcctcccgagtagctgggattacaggcgcccgccaccacgcctagctgatttttgtatttttagtagagacggggtttcaccatattggacaggctggtattgaactcctgacctcaagtgatccacccgcctgggcctcccaaaatgctgggattacaggcgtgagacaccgtgcctggccagagaaaagtattttgttgctgcttctgggtgcccagagaaatgagacatggggctgggttcacaggaaacgaggtgagttgtgagacaggggctggggtggggacactaaggtggcagttcagctgcatcttgcggccctacctggtgggggcgctgtgaccctggaccagcagcttggcctctctggacctcattttccattttgtaaagtgggcctggattattccagtaagagacacactatgtgtgaggatgctggcccagagtaggtgcttggttggggtgaacgccccttcgtctttccccatttcatttttctcttgaactgtgcacattattccttcatttgtcccacaaatatttgttgagcgcctgctatgtacgcagcagtgggtggcaaataagcaaaaagtccctttgaacctcagccttgtggctccactcagcttttctcccaggcaggacccttgcatttctgaatctctccactgggcttcacccagggatgatcaaaaaatatgagttccagaagatacattccccacacgagcatcagcccttcctttgcaccagaacctgtgctcacagctgcaaagaggcgtggatgagacccatccctccctcaagaaacatcttctccatctacttcccttcactgcaccctgcccttgagtcagggactatgatacgattttcctcatttattcaatctgatcccaaatacatttatccgatcccaaacacatgaaatctggcagatgctcatttttaaattgacaaagaaaatatgcacatgggccaagggcagtggttcacacctgtaatcccagcactttgggaggcccaggcaggcagatcacttgaggccaggagttcgagatcagcctgggcaacatggcgaaaccccatctctactaaaaatacaaaaattagccaggcatggtggtgcacgcctcctagctacttgggaggctgaggcacgagaatcacttgaatccaggaggctgaggttgcaatgagccaagatcacgccactacactccagcctgggtgacagagcgacactctgtttctaaatgaatgaatgaataaataaataaaatatccatgtggctagccagttaacccagtgccatttatcgaatatgtcaacttaaaaaagagtatctgccagatttcatgtgtttgggatcagatacatgaaataagtgtattttattggaaataaaaatatatttatttatttgtatatatttatgctgcacaacacatttggatatatgtatacatagtggaatggctccatcaagccagttaatatatgcattacctcacacatttatcatttcgtttggtggtgagaatgcttaaaatctactctcaataattttcaaatatacaataggttgttataactatagtcaccatcatgtacactagatctcttggtcctcctgcctaactgaaattgtgtgtgctttgatcaacatcaaaaagatgaacgataacaagtgttggcaagaaagtgaagagatcatgttaaaaccctcaacaaataaggcattaaaggaacatacctgaaaataataagagccgtctatggtcaacccacagccaacatcatactgaatgagcaaaagctggaagtattccctttgagaaccagaataagacaaggatacccactcttatcactcctattcgacatagtactaaaagtcctagccagagcaatcaggcaagagaaagaaataaaagacatccaaataggaagagaggaagtcaaactatctctgtttgcagatgatacgattttatacttagaaaactccatagtctctgcccaaaagctcctcaatctgataaacaactggtaaagtttcagaataaaaaccaatgtgcaaaaactcaataggatttctataaaccaacaatgtccaagctgagtgccaaatcaaaaacaccatctcattcacaatagccacacaaaaaaataaaatactgaggaatacagctaacagggaaggtgaaatatctgcctgtggtcccagctgcttaggaggctgaggcaggaagatcacttgagcctggaaagtcaaggctgcagtgagctgtgattgcgccaccgcactccaggctgggaatggactgagagcttgtctttttttttttttttttttttttgagctagagtttcgctcttgttgccaaggctggagtgcaatggcgtgatctcggctcactgcaacctccacctaccgagttcaagtgattttcctgcctcagcctctcgagtagctggggttacaggcgcacacaaccacgcctggctagttttttgtatttttagtagaaacggagtctcaccatgttggccaggctggtctcgaactcctgacctcaggtgatccacctgcctcagcctcccaaagtgccaggattacgcgtgagccaccccacccagcctctaaattaaaaaaaaaaaaaaaaaacaagttataaaagctccaggcacagtggttcacacccataatcccagcactttgggaggccaagatgggaggatcacttgagttcaggagttcaagaccagcctgggcaacatggtaagaccccaactttacaaaaaattttttttcaattaaagaaaaacatcttgctaaagaggtctcctcttcctgagataaacggctgcttgacagtaaatagaggcaggaaacctcatgtttgatctgctgcttgataacaagaagacatcaaaaccaccacagtagctgcttaagatgataaaaatgaccatcctcagtacataaagactgtgcatgaaataacttatctccagcttagaggaagttccgccccagctaccacacatttaacagatcttcccagaacatctgagctcatcactgagccaggagctgggatgactgcagtggccagggcagacatgatacctgctcttgtggactttacactggacggagaaggtggaggatgaattattggctgagttttagaaaagagcatgaggagtgtgaggaagagatggcagtggctatgggggatgaacaacctcatcctcagaaatcaggacacctggttgggacttcggggaggagatggcatttcagccaagacattctgctccaggagcagagggagaggaaagggtgcaccaggcagagggaagagcatgttccaacgacccgaggtgggaagatgattgcccatccaaggaaaagaagaaagacaatatgggccgggtgtgatggctcatgcctgtaatcccagcactttgggaggccgagatgggtggatcacttgaggtcaggagttcaagaccagcctggccaacatgatgaaattctgtctctattaaaaataggaaaattagccaggcatgttaatgcacacctgtaatcccagctactcaggaggctgaggcaggagaattgcttgaacccagggggcagaggttgcagtgagctgagattgtgccactgcactccagcctgggcgacagagtgagactccatctcaagaaggagaagaagaaggagaaggagaaggagaaggagaggaaggggaaggggaaggggaaggggaaggagaaggagaaggagaaggagaaagagaaggagaaagagaaggagaaggagaagaagaaggagaagcagaaggagaagaagaggaagaagagggagaaggaagaaggaggaggatgagaagaagaaggagaagaaagccaatatgggccgggcacagttgctcacacccgtaatcccagcactttgggaggctgaggtgggtggaacacttgagcccaggggttcgagaccagcctggccaacatggtgtaactccgtctccactgaaagtaggacaattagcccggtgtggtgatgcatgcctgtaatcccagctactcaggaggctgaggcaggagaatctcttgaacccaggaggcggaggttacagtgatctgagatcatccaacctaggcaatagagcaagactccatctcaaaaaagaaaaaaagaagaaggagaagaggaagaaagaaagacagacaaacaatatgacaggggccttgggcagcaaggagtggggagtggctcatggagccaaaatagacagtcaggggtctgatttcaaagggtcccaacagccccaagattacactcatctacacgggtgatactgtctgtccatgataaacacagaaggaacagtgggttcaaatgaggtcaatcacacctggaaaatgaatttcaaataaactcaggaatagccattcacatttcaaaaggattttgcaactcacaaatctccatagcattggaatgagagagtcatttgcttgttttctcagcaagtatttattgagcacctattagatgctgggtggtgggacacaatgatgagcgagtccaaagtggtcctgcctcctcaggtggccagtctagtggaaggaacaagggatatgtctattaagtaacttatatgacataatgcagttagcattacagtagaagtagaagcctcggcccctctcagagctctggaaaccttcccctccatctactccagcagcatgggaagttcacgggggccacagctggcaccaagtgttttccacgctttgcttctgagggccaagatgccatggtgctttctgtagcatttaactgtgtggagctctgggactcttgtgtcttgggggaagaaaggaccactttttttttttttttttttttgacagaatcttgctctgtcttgcccaggctggagttcagcgaatgatctcggctcactgcagcctccgcctcctaggtgcaagtgattctcctacctcagcctcttgagtagctgggattacaggcgcctgccaccacacccgactaatttttgtatttttagtagagatggggtttcaccatgttggccaggctggtcttgaactcctgacttcaggtgatccacccgcctcggcctcccaatgtgctaggattacaggcatgagccactgcgcccagctgaaggaccacttctaattcctacctatgtctcttgctgctaattaaacatctaagtttagaggctaagggggatactacctggggaccattcctccggactggagtgagcctgtgtttctgtcttcatcttagccccgagctatggatcaaacctcggctgcctgcagctctgtggttgatcctgagggactccttcatttacacaaatgaagtgtagataagaattgtgtgtcaacttttaatgagccctcaagggtcattgaaaaatcccatggctagttcactgatgaaacttagaattggcttcccagggattgttatgacaatagagtttggtagatcgtgccggcaggtgttccactgggctgtttgatgccactcaaggctctagccaagcgcatctctgatgtgtcctccaggaagggtgtccaggggctttgactgatgagcacggggagttttggaggagggctggaggtggcgggttcagatgaattctactaattgcttggtatatggaccccatgacatcacttcaactgaattctctgggagtttgtttttgtttgtttgttttctgtttttttgtttttttttttttttgagatggagtctcactctgtcacccaggttggaatgcagtggcacaatcttggttcactgcaaccactgcctccagggttcaagtgattcttcggcctcagcctcctgagtagctgcgattacgggcacttgctaccacacccagctaatttttgtatttttagtagagatggcattttgccatgttggccaggctggtcttgaactcctcaacttaagtgatcctcccacctcggcctcccaaagtgctgggattacaggcatgaaccactgcacccagccattgttttctttgtttcagcagagatccactggacgtatgaattgtggatttctctttgggttcttaaacacagattaacaggcagagggtgacttgtataatagtctaagtggcttcatgcctcaggaccctggctcacatcagataaacttgactcgaatcctggcctacctatttcctggttgtgtgaccttagtgaagtgaattgacctctctgaacctgtgtctgcaaatggggaggccaataataatagcacctgccccacagcatgatgcctgtaaacgtattggcatttcataaatcctcaatacgtgctagacagtatgattgtgtcacccagtagagtcttgtagggatctgggtacaactgatggagccagctcatggctttacttacctcacccccacgcctttaaaactcatctattcatgcctgtattaaggatttattcaacactttttgtgttccaggctgtaggaaccaaaccttgtctgcctgcagctcaaacaagagaacaagcaagatgagatcctctgccctcctggtgttttttttgttctcgtggggagaaaatgtattaaaatatgagttactgcatcagacatataaaataataatttcaagaaaatggatctgtgattgtaaatattgggtcaaatttagcatcagagtaaacaaataaatggatattatgtcacaatcagggcggactgtaattaaatgactttctagagtgcggctgcatccccatgaagctcagaccccattgttgcctttttattttattttattttatttatttatttttgagacagagcctgttgcccaggctggagtgcaatggcgtgatctcagctcactgcagcctctgcctcctgggttcaagcgattctcctgcttcagcctcccgagtagctgggattacaggcgcctgccatcacgcctggctaattttttatatttttagtagagatggggttttaccatgttggccaggctggtctcaaactcttggcctcagcctcccaaagagctgagattacaggcgtgagctgccactcccgatctggtcttgatttctctttttttaaggacactaaccccactgggcgaccctactttcttggcttaatcttaacctaattacattccaaaggccccatctccaagtattatcacatggggggttagggcttcaacacatgaatttttggggatacacacattcagctcataaccctgatctgaagctaagtttctgaaccaggagcaagaaactactcttagtttctgatagcttgtctccatgaccctggaagaaaaatcaaacattatgtttcttttctctgcagcaaggatgcaggcatctatctcattcccacacagttccaggttcagttcccttgcagtcctaaggttcagggcagtgagagcaagaaccagaccaggttcctatttgacctaattcctttttttttttttttcctttttttgagacaaggtctactccgtcacccaggctggggtgcagtgttatggtacgatcaaggctcactgcagcctcaaagtcctggcctcaagcaaccctcctgcctctgcctcctgagtacctgggagtacaggtgagtgccaccatgcctggataactttagtattttattttatattttattttatttatagagatggggtttcaccatgtttcccaggctggttttgaactcctgggctcaagcgacctgcccgcctcggcttttcaaagtcctgggattacaggcatgagccactgaccatggcctaatccaaaatgatatttgttggggaagaagtgttcctacggatcgtgaccttgttatgccatgactgtttggctgtgagtgatattcctgtaaatatgtgagtttgagccaggttcaaggaacgatcatgcctaattcttttttattctttcaataaatatttattgagcaagtattctgatgggtttgaactgggcttggatgcagcaacaggactgggaggatcacatcccttagccagttcctcacattgatccaccattgcctcacagactttggtcttttactgccttaataattttcactaagaaccatctgcactatgacgtgtttctctcgatggactcactctttttttttttttttttttttgagacaaggtgtttgttgcccaggctggagtgcaatggcacaatctcagttcactgcaacctctacctctgggttcaagtgatcctcctgcctcagcctcctgagtagctggaattacaggcacgtgccaccatgccaagctaatttttgtatttttagtagagacggggtttcaccatgttggctaggctggtctcaaactcctggcctcaagcaattcacctgctttggcctcccaaagtgctgggattacaggcatgagccactgcacctggccaaagctgccacttttaaaccatcagatctcatgagaactcattcactatcatgagaacagcgtgggggaaaccacccccatgatccaatcacctcccaccaggtccctccctccacgagtggggattacagttcgagatgagatttgggtggggacagacagccaaactatatcaggacctgagggcctcagctatctttttcctgaaagcttcaggctaattgcatcagaagaaagcctctgatctgggtgtttagtgaaatagaagttggtcccctgtattggtcaacctaggtttggaatgctgcagtaacaagtagtgaccttgaaattttagcaaccataaaccaaaactaaaattctaaggcctcccaaccatctgaatggactcctcctttctcggccaagggtattccaaagttaacctgaaaaacctgaacctagttcaggccatgatgggaagagaaggtagaagtagaaggggccagacatgcctcattacagcctcctcccttttggtattcaggaaaagcagaccagcataaacgtcaatgcagaccttaagtctgataagaaacatttaccatctattctctctgaggcctgctacctggagacttcatctacataataaaaccttggtctccacaaccctgtatcataatccagacattcctttctattggtaataactctttcaacgaattgccaatccaaaaaaattttttttttttttgagacacagtcttcctctgtcgcccaggctagaatgcaacgttacaatcttggcccactgcaacctctgcttcccaggttcaagtgattcttctgcctcagcctctgagtagctgggattacaggtgcccaccaccacgcccagttaatttttttgtatttttagtagagatggggtttcaccaggtttgccaggctggtttcaaactcctgacctcaggtgatccacccaactcagcctcccaaagtgcagggattacaggcatgagccaccgcacctggcctgccaatcagaaaatttttaaatctacttatgactgggaagcccccactctgccaaccctgcatcgctgcccagcttcaagtcgtcccacacgtccagattcaactaatgcaaatcttacatgtattgactggtgtattatgtctccctaaaatgtataaagccaagctgtaccccaaccaccttgggcacatgttgtcagtacctcttgaggctgtgtcagggttacatccttaacctgggcaaaataaattttctaaattgattgagacctgtctcagatattttcggattcacacaactgacaaccacaaagcttcatttcttggctacatttatatccatagtgggtccacagaagctctgttctgcagggtcttcttccttgcaggaccaagtgtgaaaaagtggcctctctctgggatgggctgttcttgtagcaagggaaaagcaaaaataatataaccacataaggctcttaaggttcctgctcagtggtggtacatgccaattcctgttccatctcattacctcaagcaggagcatggccaagcctggctttaatgggagtgggaactacaatccccttgcagggatagacggacccaacattgctcctggggcgtttcttccactcagcagaaatcagaaaaggacatgaaaagtgagtaagccttgtgccaagaaagactctaggctttggagaaacgtcctttattgttgcctctggggattcagagcccagagagggcagggatggaggttgaggatgcacaacaagaggtttacaccaatcttatggggtaggggcctaggtcagcagctctgcctcttctcacagatgtaaacaggagactctgatttgcaagaggagttgctccagtgtccctggtagagcatcatcacacaggctggggtggttccattatcatccaatttcctggagtcccagtttctgtgaagagatgcccaccacatccctttctgatgggaccagagcctgaagccccaactcctgccctctgtgagtcaggatctgccacctgaagctcaagaggcccccagttattggggcctcttattgagcccattgtatggccacttattgagcccattgtatggtaaccatctggtcaaccccttccctctttttttccaagtggagctcagataggagtagcaacaaggccacagtcttcagaaaagctgaaagtcttccagctcctgggccaccatccgactgccccatccctctgggcttctccccttctccaaggtccattccgcttgaaaccagacagaccccattcaaattccagctctgccacttgtatctgtttgactacggtcttaatgtctatgagctgccgtttcctgtttcacaaaatagaaattcattctgaggatatgatgaccagtgcacataaggtatacggaaggtgctcagattgcagatcaatctgccaatgagacaacttctgccctaagcttggccccatgcagagcagcttgccagtcagggaaggtgatgcaggaggtaggaaatgtcgcagaaaaaggcatacagtgtgaggatgcaagacaatgccaagaggtatagtgaattaaagtgtcctctccaaaaatatatgccatgtccaaccccctaacacctgtgcatgtgactttacttggaaagggggtctttacagctgtaattaaatgaaagctctcaagatgagatcatcctgggtttgtcaggtgggccctaaatccaatgttgagtgtccttataacagacagaaaaaaggagacacagaggtgaggagaaggccgtgagaagacagaggcagacagtggagtgatgccgccgcaagccaaggaatgcctggagccaccagaagctggaaaacacagggaaagattcttcctcagaccctttggaaggggcatggccctaccgacattttgactggaaacctctggcctccagaacggtgaaagaacacatttctgttgttttaagccacccagtttgcagtactttgctatggcagccatgggaaagtcatacagttggcaaatgctacattgtttcactccttctgagtaggcttagtgctcattagcacattcagggctctgaaaagtcctgcaacaaagaaagcagtttgacaacaggtgctggcaaggttgcagagaaacgggaatgcttttacgctgttggtgggaatgtaaattaattcaaccattgtggaattcctcaaagatctagaaccagaaatatcatttgacccagcaatcccattactgggtatatgcccagaggagtataaatcattctgttacaaggatacatgcacgcctgtgttcattgaagcactatttaagacatggaattaacccaaatgaccatccatgatagactggataaagaaaatgtggtacgtatacaccatggaacactatgcaatcgtaaaaaggaacgagatcgtgtcctttacagggatatagatggagctggaagccattattttcagtgaactaatgcaggaacagaaaaccaaacacagcgtgttctcacttataagtgggagccaaacaatgagaacacatggacacagggaggggaacaacacacagtgaggcctgtcaggaggtggggttgggggagggagagcattaggaaaaatagctaatgcatgctgggtttaatatctaggtgatgagttgataggtgcagcaaacaatcatcgcacacatttacctatgtaaccaacctgcatatcctgcacgtgtaccccagaaattaaaattcaaataaaatttaaaaaagattatgactctctctgaaggctcagatgattgttagcactttttatcaataaagtatatttaaatttaaaaaaaaagagtttgacattgaacccataatttctcaagcaccaaactgggaacactcttgtcaagtaacaaaataactataactaggataatagaaaagatgtcggctgtgcgcggtggctcacgcctgtaatcccagcactttgggaggccgaggccggcgaatcccctgaggtcaggagtttgagaccagcctggccaacatgatgaaaccccgtctctactaaaaatacaaaaaattagctgggtgtggtggcaggtgcctgtaatgccagctactcagaaagctgaggcaggagaatcgcttgaacccaggaggcagaggtggcagcgagccaagatcgcaccactgcactccagcctgggcaacaagagtgaaactccatcttaaaaaaaacaaaaaacagaaaggatatcaggcagtttgggagctactacgggtacttcattgtgaatgaatgaaagagaaacacctacagtggtcataacttactgcctgaaagccatgcctgcctcttaggggagactatctttggtgtcaaaggagatactcacatgtaggtgggggctgagccatccatccacctgtgggcacttccttggccatctttgaagaggcctatccaggatgtcgcctggttagttgatgtcaggaagtcctggaaggaagaagttacatttgggaggtggaattccttggaagctgaaaggatggaggcaggggtgtacagagggcgagaggagtaagttgcagagatcacagttagatgggcaggcagacagaggcaggcagggaattcactgcccttgaatcttgactttgaatctcagatctactatgtattaggttggtgcaaaagttatcgtggttttaccactatagaaaacagtgtggagattccttaaagaactgaaaatagggccggacacggtggctcacgcctgtaatcccagcactttgagaagccaaggcgggtggatcaccggaggtcaggagttcgagaccagcctgaccaacatggagaaatcccgtctctactaaaaatacaaaattagctgggcatggtggcacatgcctgtaatctcagctactcgggaggctgcagcaggagaattgcttgaagctgggaggcgaaggttgcggtgagccgagatcacaccattgtactccagcccgggcaccaagagcaaaactctgtctcaaaaagaaaagaaaagaaaaaaaagaactaaaaatagaactaccatctgatctaccaatcccactactgggtatctacccagaggaatagaagtcattatacgaaaaagatatttgcacaagcacttttatagcagcacaactcactattgcaaaaatatggaaccagcccaaacgcccatcaatcaatgagtggataaagaaactgtgagatagatatatactgtgagatatatatatactgtgagatatatatatacacatatatacacacatatataatatatacacatatgtatactgtgagatatatatacacatacacatatgtgtgtatgtgtacatatatacatgtgtgtatatatacatatatacatatataatatgtgtgtatatatatacacatatatacacgtgtgtatatatacacatatacatatatacacgtgtgtatatatacacatacatacatatgtatatatgtgtatatgtatgtatatatgcacacacagtggaatgctactcagccataaaaaggaatgtattaatggcatttgcagcaacctggatggaattggagaccattattctaagtgaagtaactcaggaatggaaaaccaaacatcgtatgttctctcataagtgggagctaagctatgaggatgcaaagacataataatgacacaatggactttgggaacttgggggtaaagggtgggaaggggtgagggataaaattaggttcagtgtatactgctcaggtgatgggtgcacaaaatctcacaaatcaccactaaataacctactcatgtaaccaagtaccacctgacctcaggtgatccacctgcctccacctcccaaagtgctgggattacaggcgtgagccaccgtgtccggccctattttcagttctttaaggaatctccacactgttttctatagtggtaaaaccacaataacttttgcaccaacctaatacatagtagatctgggattcaaagtcaggattcgagggcagtgaattccctgcctgcctctgtctgtcttcccatctaactgtgtctctgcatcttactcctctcgccctctggacacccccgcctccatcatttcagcttccaaggaattccacctgttcccccaaaacctatggaaataaaaaataaaataatcgcagtttttgccattgaaagtaatacacgttgcaatggcctccaacaattcagccacccctcagtttccccatcagcacaaacaaaagaatggagatccccagctcttaatatattctcacggccgggcacgttggctcacacctgcaatcccagcactttgggaggccgaggtgggtggatcacgaggtcaggaaatcgagaccatcctggctaacacagtgaaaccccgtctctactaaaaatacaaaaaaacatttagccaggtatggtggcgggtgcctgtagtcccagctactcgggaagctgaggcaggagaatggtgtgaaccctgcaggcggaggttgcagtgagccgagatcgcgccactgcactccagcctgggcaacagagcgagactctgtctcaaaaaaaaaaaaaaaaaaatatatatatatatatatatatatatatatatatatattctcacaagtcaattgtgagaagtgtgtgcacctaggaagaccccctggataaatattggctgtgagtgtgcatgtcagagcaagcagtttgatctataggccgtaggaagacttctgtcaggagactcaatcccagggacaatcttgagaccctatcttaggtcaagccttgtttttggcctaggagacccagacatgattcagatctagccccagagtcagtggataccaggcaaccccaatgcagcatgaagttctgggataaagatctctgatgggccgggcacggtggctcatgcctgtaatcccaatactttgggaggcagaggagggtgtatcacctgaggtcaggagatcgggaccattctggccaatatagtgaaaccccatctctactaaaaatacaaaaattagctgggcgtggtggcgggcgcctgtagtcccagctacttgggaggctgaggcaggagaatcgcttgaacctgggagatggaggttgcagtgagctgagattgcgccactgcactccagcctggcgacagagtgagacttcatctttaaaaaaaaaaaatctctgatgatgctacaagaggatgtggaggaagggatgtttgtgttgggcttttgagggatgaataagacttctccatgcagatggcaaaggaaaggactgtccagagagtgacccacaggaatcagagcttcgagacaagactacagtgcacagggtccgttccctgaatgacggagcagtgagattgggctggggcaagggaaggcagatcttcaagatcctactaagagtactgtacatgatcccaaaggggataaggataggaatcccaaaattcttgtagaatccttcctccacctccactagggtcctaactttccgtttcccacctattctgctcagctgttgatgacaaccaagtgagctgcttctgggcacaagaatcaatggcctggggccaggtgaggttgtctgaaaagaagctgtaacaggagccctggaaggccttccagctcttggggcagggcaggcaggaggattctgtgaggatggagccattagcaaatttagtgtatccagctttccacccagttgcccacccactcgcttctggccacattcctaatggcttccacttgaatacacccaacaatggggaactcactacctagacagttggtgcttgacattactgaaacatatcagaaggacatactaaaatgccataaatatcctactgggtgtgttagctcacgcctgtaatccaaacgctttgggaagccaaggcaggtggatcacttggggtcaggagtttgagaccaacctggccaacatggtgaaaccccatctctaccaaaaaaaatacaagaattagctgggcatggtggcacgcacctagtcccagctacttgggaggctgaggtgggagaattgcttgaatccaggagctggagattgcagtaagccaagatggcatcactgcattccaccctgggtgacagagtgaagctctgtctcaaaaaaaaaaaaaaaatgccataaatatcctattaagtggaaaaggcaactgtaggaataatgtgccaggcgcggttggctcacgcctgtaatcccagcacattgggaggccggggcgggtggatcacttgaggtcaggagttcaagaccagcctgtccaacatggtgaaaccccatctctactaaaaatacaaaaattggctgggtgtggtggcgggtgctcataataccagctactaaggaccctgaggcaggagattgcttgaacacaggaggcagaggttgcagtgagctgagatcacaccattgcactccagcctgagagaatgtgaataatatactacctttaaataaaatagaaaagcatatgtttgacattccttgttttcttaaagaaactctacggctgggcacagtggctcacgcctgtaatcccaacactttgggaggtcgaggcaggtagatcacgaggtcaggagatcgagaccatcctggctaacatggtgaaaccccgtctctactaaaaatacaaaaaaaaaaaaaaaattacccgggcgtggtcgtaggcacctgtagtcccaggtacttgggaggctgaggcagagaactgcttgaacctgggaggcagagcttgcagtgagccgagattgcaccactgcaccccagcctgggcaacagagcgagtctccgtctcaaaaaaaaaaaaaaaagaaagaaagtgtaaagcagtggtccccagtcaggggcgattttgtccccagtggacatctggcaatgtctgaaggcatttttgttcaccacaactagcggagaggtaccactggcatggagaaggtagagaccaagggtgttgctaaacaccctgcaatgtacaggacagccccttactgcaaagaatgattcatccccacatgtcaatcgtattgagtttgagaaaggctgccctaaaggaataaagcccagctaattccagtagttcttgggagtttgtgttggggcttaggtggggaacatggcaatgaggtttcaggagtgggagggaaaattctcactgattttatctatatccatctacagaacacatacaccatcaatcattacttgtgggttccatatttacaaatccacctactcactgaaatgtatttgtaaccccagagcagatacttatgtcattttgggggtcatttgtgcggataagcagagtagtgaaaagtttgagtctgagatagaagaaaagaactctctgctgtcttgtttcagctttcctgctgtaaacaagtgtccttttcatggactattaagtgccatgtttttcacatttttgtgcttttctttctttctttctttttttttttttttttgagacggagtctcattctgtcgcccaggcaggagtgcagtggtgcgacctcggctcactgcaacctctgcctccggggttcaagtgattctccagcctcagcctcccgagtggctgggactacaggcacacgccaccgcatccggctaatttttgtatttttagtagagatggggtttcaccatgttggccaggctggtctcaaactcctgaccttgtgctttttgtcgatgactttgttgttgaaaatggccctggcataatgctgaagcactgtctagtgttcctaaatgcaagaaggctgtgatgtgcctcgtggagaaaatatgtgtattagagcagcttcattcaggcttgagctatagtgctgttgaccataattcaaagtgaatgaattaacaatatatataacacgtatttaaacagagcctgtaatccagcactttgagaggccaagttgggtggatcacttgaggccaggagttcaagaccagcctgggcaatatggcgaaacaccgtctctactaaaaatacaaaaattagctgggcatggtggtgcatgcctgtattcccagctgcttgggaggctgaggcaggagaatcacttgaacctcggaggcagaggttgcagtgagccaagatcatgccagtgcactgcagcctgggtggcagagggagactctgtctcaaaaaaaaatgtatttaaacagaaacacacacaaacaaggctacgtaatgatcagttgacaaaatgctgtgatgagagtctcgctggaacctaactgtattttctcctgggacctgtggttcaggattcatgaaatcagttctctctggacttcatagtgtgtagcaatggtggatactaagactcaacggcatatacagcatatctcatcctgtcattcaaaagttctatttacattctgttaagtgaaataagctaggcacagaaagataaatcctgcatgatctcacttatccgtggaatctaaaaaatctaattcgtagaagcagagagtacaaccgtggttaccagggaatgggggagggggggtggggtaaggagatgttggtcaaaggatgcagagtttccatcagacaggagaagtaagtttggtcatgatccactgcacagcatggtgaccatagttaataataatgtcatctctattccaaaattcctcaaagagtagattttattttttcttttctttctttctttctttctttctttctttccttctttctttcttgctttttgttttgtttgtttgtttgagacggagtttcactcctgttgcccaggctggaatgcaacggcacaatcttggctcactgcaacctctgcctacggggttcaagggattctcctgcctcagcctcccaagtacctaggattaaaggctcccatcactacgcccggctaattttttgtatttagtagagaaggggtttcaccatgttggccaggctggtctcgaactcctgacctcaggtgatccgcccgtctcagcctcccagagtgctgggattataggcatgaggcaccacgcccagccaagagtagattttaactgttctcaccacatacacacaaaagaatatgtgggtgaggtgatagtttcattagcttgatttgctgatagatatgttcattagcttgtggaatgattattccacaatgtatgcattttaaatttttatttttatttttatttttttgagacagagtctttctctgtcacccaggctgcagtgcagttgcatgatctcagctcactgaagcctctgcctcctgggttcaagcaattcttgtacctcggcctcccaggaaactgggattacaggcataggccatcacgactggctaatttttgtatttttagtagagacagggtctcaccatggtgccgaggctggtctcaaactcctggcctcaagtgatccacctgccttccttggcctcccaaagtgctgggattacaggtgtgagtcactgtgcctggcccacaatgtgtacctttatcaaaacctcacattatacctcatggatctatacaattatccattgaaattttataaaacatttcatttaattaaatgttcatttaaatttaaattaaacttgcattaaagtcaattaaatatttttcaaagttttattaactttttgatatcgacttaattttttttagttttgggaaggaaaagagttctacttaaaatatgtagcacaaaggtaccacctacaacggaatgtgatccaatagggttgtgtggaacccaggcatctgcattttagcaaactcgctgcattcatctgacaggctgcagaggacccactgtattttgcagcacactgatgtggtgatttaaagtggaggctccggtcagaggtagatttacagcagacacctgtaatcccagcacttttggaggccaaagtggaaggatcgcttgagcccaggaatgtgagacaaggctgggcaacatagtccagggaaagaggaggggagggaaggggagggggagggggaagggaggaggagggagaggggaggggagggagagggggagggggaggggaagaagaaggggaggggaagggggaagggaggggagggaaaaagaaaagaggaggctctgaatcctgacaatgactcttgagaatgacactgctcatttccccccgattctgcagctgagggaactgaggctgagagaggttaaaggggctgtccccgcggttgcacacagccacacctgcagagcaggtctcactgtcctcaaagccttacttttctggtatcccttcactatccgttggtctgaccatgtcacctcaactttctccatgttccgctagcactaaaaagacccaagaatcccccgggcattgggctgcctttccgagatccctgctacaggaagcccccgtcaccagtgccgaaaggagcagagtccccgcccttcccccacctccctttccccactcctcaccattgcgtgcctggacaacctttatttgcctgaacatttcaccccgaatgaagtcccggtcatgtccggtgtctgccagccccggtgtcactgagagacccaaagagaacgcgctggtaaaggtcttggcagagttgcgggttgggagatgtgattaagggtcggggggcggggcatctccttggacgcccactcacctttttcatcccgcacatccttcgtcatcctcaagactggggagagacgccagcagcatgttctagacgctcccctcactcaaagaacctccctggggtttctctgtgttcccccaactcccagagtccaagactttcttccagccccagggcaaggcactttggagctctgaaatgttccactcattttgcggatgagaaaacccaggcccagggacataaagtttcttgtctaaaagcaaccagctagtgagtagtaaggagggaatttcattccagtgtgtctggactgtttagggaatgcaggcagcctggaggttctaatcccagctcagggctgggcttaggggaggtgctcaccaatgactcaaacctgctcgctaatgattctgctccttcagttcatacacacccccgcatgcctccctctgaggctggtgaggaggtcagctccctcctgtgtcaccatggtcacccccagggacacgaccagcagcccctccggctccacccctatcccagcgtttccgaatccgacccaccctacaggttgggagccctcatggctgctgtcccggggccacctggtccccctgattcagccgccttacctctggacagaagcacactgaggagaacaaccaggagaagcaggatcagagacaccaccgggcagagatacttccaggtctttttttattttttattttattttgtttttgttttttttttttttttccgagacggaatcttgctctgtcgcccaggttggagtgcagtggcgcaatctccgctctctgcaagctttgcctcctgggttcacgccattctcctgcctcagcctcccgagtagctgggactacaggcgcccgccaccgcgcccggctaattttttgtatttttagtagagatggggtttcaccgtgttagccaggatggtctcgatctcctgacctcgtgatccacccgtctcagcctcccaaagtgctgggattacaggcgtgagccaccgcgcccggcatttccaggtcttgtcatggggcttctgtgcccgttgccctgggtggaaaccaggtcagcttcccctcccttcagggatacccactctcttttccttagatgcccgagactcctctcaggctgcagggaaatcgctgaatcccccgtgctcttctgggacccctgctgaatgcaccggatgttgaggactcagaaaagactagaaaaagaagcctgtccctctgggatgtggagtaatgaggaggaagcctcagaaagatgggaactccatgccctctctttctcctgcctatggttagagtgcaggggcaacccagcacccagctctttttttttttttttttttttttgagatggtgtctcgcactaccacccggcctggagtgcagtggcacgatctcagctcactgcaacctccgcctccagggttcaagagattctcctgcctcagcctcccaagtagctgggattacaggcgcccgccaccacacccagctaaattttttgtattttttagtagagacgggttttcgcctgttggccaggctggtcttgaactccttaccttgtgattcacctacctcggcctcccaaagtgctgggattataagcgtgagcctccgcgcctggcccaccaagctcttaattgcacataaaagggtttctggtcccagcttcttgactcaccagtttcccccagcctggggggaagtttgggccccaatgctgataattctttggggtccttgctgctagcatccctgccttcaatcatgaccgcagctcactctgctctgagatgctcctactctacatgcttatttctgggaaactccacccagcccttggaaggaaacactccccttcaagtctcttacactgctcctccttcctggcttagagtgtggcccgagatcctgagatatctggtcatctgttaacacagccggaaagaggacctgggtctctgagctcaggaggcagtgggcaccaagtctcctctgcaaagctgatttctgtccaaggtgactgaaacacaaagcaacagagaacggaatctcagatccctgtactgacacccccaccgccactctctgcttctcacagcttagcatgaaaagtgctcttggcttctcacgatgaagtggtggacatttcaaccgaggaaatgatttgtgtgactcttttcttggacaccgaggacaatgacatttcccaacagctttcattcatctccccagctaggtagctacttgtagttttaatgtggccaacaagcatatgaaaaaaaaatctttacatcaccggtcactagagaaatgcaaatcaaaaccataatgagattccatctcacatcagtcagaatggctattactacaaagccaaaaaataacagatgctgggggcagggggttgcagagaaaacggaatccttatacactgttggtggggggtgtaaattagttcaaccatggtgaaaagcagtgtggcgattccttaaagagctaaaaacagaactaccatttgacccagcaacctgattatagagtattcatccaaaggaatataaatcattctaccataaagacacacacatgagaatatttatcgtagcactattcacaatagcaaagacatggaatcaacctaaatgcccatcaatgatagactggataaagaaaatgtggtacagatacaccatggaatactgtgcagccatgcaaaagaacaagatcacgtcctttgtaggaacatggatggagctggggtccattatcttaagcaaactaacgtaggaacagaaaaccaaataccacatgttctcacttataagtgggagctaaatgatttgaacacacggacacatagaggggaacaacacacactggggcctattggaggctggagggtaggaggagtgagcggatcaggaaaaataactaatgagtactaggcctaatacctgggtaacaaaaataatctgtagaacaaactcccgtgacacaggtttacctgtgtaacaaacctgcacatgtacccctgaacgtaaaatgatattttaaaaaaatgaatacaggccaggtgcggtggctcctacttgtaatcccagcactttgggaggccgaggcagacagatcacctgaggtcaggagttcaagaccagtctggccaacatggtgaaaccctgtctctactaaaaatacaaaaattggctgggcgtgagggtgggtctctgtagtcccagctactcgggaggctgaggcaggagaatcacttgaacccaggagacggaggttgcagtgagccaagatcacaccattgcactccagcctgggcaacagagagagattccatctcaaaaaaggaaaaaaatatccaatccactgttgatgggcacctaggctgattccacatctttgctattgtgagtagtgctgcagtaaacacacaagtgcatgtgtctacctagtagaataacgtattttcttttgggtagatacccactgataggattgctgggtcaaatggtagctctgtttaaagttctttgagaaatctccaaactgctttccacagtggctagaccaatttacattctcaccagcagtgttcccttttctctgcaattttaccagtatttggttgttttttttttttttcactttttagtaacagccattctgacgggtgtgagatggaatcttattgtggttttgacttgcatttgtctgatgattaacgaagaggaacattttttcatttgtttgttggctgcttccctattcaataaatgttcgtgggataactggctaaccatgtgcagaagaatgaaccgggaccctgacctttcaccatgtacaaaaattaactcgagatgaattacagatttaaatgtaagacctcaaagtattaaaatcttagaagaaaacctaagaaacatccttcttgacatcagccttggcaaataatttttggcaaatcccaaaaaccaattacaacaaaaacaacagagtgagactctttctcatatttatattgagtatcacagtcttctaaataattccaatgtattgaaatataatgccctaatcctgatatttgttgttttaggtcactatgttttggtggggggctgacttgttacatagtaatagacaactattacacaggcttaagcacttaataaatatcttttttttttttttttttgagacagagtctcactctgtcacccaggctggagtgcagtggtatgatctcagctcactgcaacctccacctcccgggttcaagcaaagctcctgcctcagcctccctagtaaagtagctgggactacaggcatgcaccatcatacccggctaatttttgtatttttagtagagacgaggtttcaccatgttggccaggctggtcttgaactcccaacctcaagtgatcctcccgcttcggcctcccaaagtgctgggattacaggtgtgagtcctttttttttttttttttcttaagatacagggtctcactctgttgcccaagatggagtgcagtgtgcctggccttaataagtaccttttgaaagcacaaatgaactatacaattggagtttatcatacagaagcacagtccgactgggacccaactgtgtcagcgtcactcccagataccttgcctatcagcacttccttatgacaaccacgttaaaatcatatgttacctgttcatgaaataaatcgcaattaaaggacaactgctcaagttctagccaacttcttgggggtgagtctggggagaagtttagaagcaatatttctgacaaataaatagcgatatcgtgtggtactagtgttgatcgtgtttgtcatttattcagaaatgtttactgaaccggctgggggtgatggctcatacctataatcccagcagtttgggaggctgagacgggcagatcacttgagaccaagagtttgagactagcctggccaacatggcgaaaccccgtctctactaaaaatacaaaaactagctaggcgtggtggcacacacctgtaatcctaggtactcaggaggcttaggcacgagaatctcttgagcccgggagacagaggttgcagagagccaagactgcaccactgtactccagcctgggcgacagagtgagatgaaaagaaaggaagagagagagagagagagaaagagagagacagagagagagagaaagaagaaagaaggaaagaaagagagagaagaaagaaaaagaaaggaaggaaggaagaaagaaagaaaaaagaaagaaaaagagagaaagaaagaagaaagaaagggaggagggaggaaggaagaagggagagatggatggagggagggaggaaggaaggaaggagagctagagatagaagaagaaagaaagaggaaaaaagagaaagaaagaaagggaaaggaaaggaaaggaaggaaaaaagaaagagcaaaaacaaaaggaggggagtggagggggatcacgccactgcactccaacctgttgacagagtgagactccatctaaaaaaaaaaaatgctattttatattttattttttgagatagtctcactctgttgcccaggctggagtgcagtggcgcaatcttggctcactgcaacctccaccaaccaggttcaagtgattatcttgcctcagcctcccatggagctgagactacaggcgtgtgccaccatgcctggctacatattttgtatttttagtagagatggggtttcgccatgttggccaggctggcctcaaactcatggcctcaagtgatccacccacctcggcttcccaaagtgctgggattacaggtgtgagccaccgcgtccaggctaaaaatgctgttttaaacactgggaagcacaggaaaagatgctcaacattattggtcattagagaggggaaggaaggggcgggggaggggagagaaggagaaatatttactgaattatgtctaggctctcttcaagcaggtgtcttagatgggtctccagaagcagattgagataaagagcctggtgttgggcctattgttaagtgtgagccttaatcggagagggggtgcggttcactgggaacctctagaggacagtgtagggaatgcactgagttattccaggaaaagggctggagggtggggggttgaaggattcatctgccagcaaccatcagtccttggttaagaaccaatcaatgagaggttaatttcccaacacttctgggcttgtctgagaggcagagtgagatccagctacaggaagctctgcagcaaagagacgttggcagttggaagacaggatagtaaatattgcaacagcaatatgcaaagagttacaggcagagctctaacagaatctactataattgaataaacagaacaagaacagacaggacaaaagagatctctctgccttatggaacttgcagctcgatgaagaagacaaacgataaaggattgcgtaccctatctgctttcaataaactaggaaacaaacactctctcagagcaataaaatgctatgacaaaaactgatcatgggataaaaattatctgggatggggggctgtttagatagaggaggaagagcttggatgaaaaggtgccatttcagccaatcctggaatcagatgagactcagtcacaaaagagctgggagaaaagcattccaagcacagggaaccgcaaatccaaaggctgtgagagaagaacagagagtctattagggaatcagaattgagcccagggcggccaagtgcagagagggagggagagcagctgggaaggaggtttgaggggtctgcagggatcagtggtgccgagtcccttatgctaagagataaatgtttgtagcaggatcttattgggagacattcactgaggtttccttcagctcccacccccttgcacttccatgtgcccccatcgctttcagaaaaaaaagaagcgcctcctatatgcacagcagagagggcaggcagagctcattcaatgagcacacgttagaattcttggccaggcgcagtggctcacgcctgtaatccccaactctttgggaggccgaggcaggcagatcaggaggtcagaagttcgagaccagcctgaccaacatggcaaaaccccgtctctgctaataatacaaaaatcagccgggcgtagtggcacgcgcttgtaatcccagctactccagaggctgaggcaggagaatggcttgaacccaggaggcggaggttgcagtgagccgagattgtgccactgtactccagcctgggtgacagagcaagactctgtctcaaaacaaaaaacaaaacaaaacaaagaaacaaaaagaattcttgccggacaggcatggtggctcacacctgtaatcccagaactttgggaggctaaggcaggcagatcacttgaagccaggagttcgagaccagcctggacaacatggtgaaaccccatctctactgaaaatacaaaaatcagccatgcgtggtggtgtgcacctgtaatctcagctactcaggaggctgaggcaggagaatcatttgaatccgggaggcagaggtcacagtgaaccgagatcacaccactgcactctagcctgggtgacagagtgagactctgtctcaaaaaaaaaaaaaaaattgttgccattgatttccaagatacacaaataacagtctcaaaagaccttttgagatctgcaagagccaggctttctgaggcaggaagtaataatggccacgtttatagtgcattttctataaagtggcacagctctgagccccttatatttagtccctgggatgagtctgacgtaggtgctgttgtctccattatatggttgggaaaccaaagcacagagaagggaattaacttgcccaagtcacacagcagagctgaggcttgagcccaagcagtccggctccagatcccatgcctttgggtggtgtttgcatccagtggtctggctttgaatctctagagccaaaagggatgaccctgaccctgacccccccaaaaatgggccagggaggcctgtgctgggaatggaggaggaacttagaggtgaaaggatggggatgcaccttccccccgacactcttatgagagcacctggcacacagttgggagggaggggtgctcaggtagcatctgctggacaggctgcctgtgcagcatcagggacccagaagagaaagggactcagagcctcaatattgccccttaaatccatcctaaaacctggtccctctcctgctcaagcacctcccatagctccttattgcccacatgataaagtccattgttgggctctgaacctgcgatccatgtggtcagccagagaggcagtcagggtcttggcttcagagaccctgccccacttccacccacacacaccctggatccttgcagtccccaagcagcccctgctggctttagatgagactcaggcagaggtgacaaacattttattcctgggaatctgcaaaggtgggtgggtggggttagggtggatccctgcaggcctcagctcagtggctccaccagcagctaaagtccgccctccgcatgcatgatcagctctggcttcctgccgggctccatgtggtgccgcaggaagcggaagcccagcagcgtgagtgccaggaccaccttcatctcggccacggcgaacacctgccccatgcagatcctgcgggcagatgagaggactctgactgtgcccaagacccgcatcctggccccatcctggcaccatcccccaaaccaggcacagctctgagaggattactgtctgcaaaatagaaaagcaatgctgcaaaatgaaataaatatacattagatatatagcctaagttatgtcacattcatttctctttgcctttagagttcatagttaaatttttcattccaaaatgatgaatattcccataaaaaagacaagtaagcaaaagtaagaaatagaagttatccacaatcccatgtcaaaataagcactgtaaatattctctcacacgtccaggttttttatttatatgtaatctttttatctgggaaaatgcttattaatatctaaatttattacatttacgtgcaatatttttgtttaaaaatgctattttaggctgggtgtggtggctcatgcctgtaatcccagcactttgggaggctgaggcaggtggatcacgaggtcaagagatggagaccatcctggccaacatggtgaaaccccgtctctacaaaaaatacaaaaattagctgggtgtggtggcacactcctgtagtcccagctactcggaaggctgaggcaggagaatcgcttgaacccaggaggcagaggttgcagtgagctgagatcacaccactgtactccaacctggccacagagtgagactctatctaaaacaaaaaatgctattttatattttattttattttattttattttattttattttattttattttattttattttattttattttattttttgagacagtctcactctgttgcccaggctggaatgtggtggcgcaatcttggctcactgcaaccgccactacccaggttcaagtgattctcctgccttagcctcccaaccagctgagactacaggcatgcaccaccacgcctggctacatattttgtatttttagtagagacagggtttcgccatgttggccaggctggtctcaaactcgtggcctcaagtgatccacccacctcggcttcccaaaatgaattacaggtgtgagccactgcgttcagcctgaaaatgctgttttaaacactgggaagcacaggaaaaggtgctcaacattatttgtcattagagacaagcaaatcagaaccacagtgtgatgcttcttcacagcccctaggatggctggaatctaaacatgggaaaataacaaacatcagctagtatgaaagtgaggctaagagaagaactgttttaagattgaggaaatatagcattatatgtattccaacaggaatgatcaaatagagtgtaggatacacggtcaataaacaaaactcaattatatttctacatcccacatatttcactgttacaggtaagaactctttggccgggcatggtggctcgcacctgtaatcccagcactttgggaagccgagtctggcggatcacttgagcccaagagttcaagaccagcctggccaacatggtgaaacctcatctctactaaaaatgcaaaaattagccgggcatggtggcatgcccctgtaatcccggctactcaggaggctgaggcatgggaattgcttgaacctgggaggtggaggttgcagtgagccaagattgcaccactgcattctagcctgggtgacagagcgagaatctgtcttaaaaaaaaaaaaaacaccaaaacaacaacaacaaaaacaaacaaacaaaaaaacaaacaaacaaaaacctgtttgcctaacctgtatatcccagggatacagaaatatttcaacccccgggacatagggattaggcaaagagttcttaaatataatggcgtaaaagtaatccacaaaaaacaaaattgataaagggtacttcataaacattaaaacctttcgctctataaaagaaacttcagggctgggctcggtggctcacacctgtaatcccagcactgtgggagactgaggcaggtgtgttagatatgagttctaaatttcttttcaaagaatcaatatgtcaggatgttcaattctttgccttctacttttaaatttaacttcctcataaagcagccttttcggattacctgttccaccctgactcattcctattacctactccaccgtgactcattctgattacctgctctgtcataaccatttttcccgccaaaccactcatcccaccactctctttaaattagccaatcggaattagtttagcctgtgtggtctaaccctagccaataggggaacgacacagcagcaggggccacatgcatcaaggataagaaccccttcccctcccttgtccaagtgtgagctcaccattgctccatctgtaagggcgcacccttctatagaagtacctttccttgctgagaattaaaaagaaaattttatattcgagtgatatttcttttgcggcaccaaaactttacttataacaggtggatcacctgaggtcaggagttcgagaccagcctggtcaacaacgtgaaacctcgtctatactaaaaatacaaaaactagcggggcatggtggcaggcacctatagtcccaaggctgagacaggagaattgcttgaactcaggagatggagattgcagtgagccaagatggcgccactgcactccagctggggcgacagagtgagactctgtcttaaaaaggaaaaaaaaaaagaaaagaaaaaaaacagataatgaaaaggctagccgcagactaggggaaaatacttgcaaatcacacatctgacaaaagacttgtctgcaaaatataatctataaagaactctcaaaatccaaaaataagaaagcaaacaacccaaggaaaattaatggacaaaagattagaacagacactttaccaaagaaaatacaaagaaggcacatgaaaagatggagaaatgcagactaaaatctctgtgacataccgcagcatacccacaaggaagactggaaaaaaaaactgacactatcaagtacaggtgagtatttggaggaactagaattctcataccaatacaggagctagaaagaaattattttggcagatagtgaggataagacagttatcagtaaggtttccttttcataaaaagcagcccccaagtcatttcttttctaacaaaaagcagcctgaaatatcaagctgcaagcacagataagcaagctggaagtttacatgggtaaatgccggcagctgtgccaatagaaaagggatatctggaagccaggtgtattcaacttggaggtttcctcttcccttttctttgtcaccatgtgtgtagtgaaaagcaggcaacaggtagaaaaagcaccggccaggtagagacccctatctgcataataaaagatcagggtgggatagccagcttcctcccatgctatgcaaacagcacacctggtctgaccaatctttcatgccctatgtaaatcaggcactgcctcctcaagcttgtctataaaaccccatgcgtttcaccacaaaaccacaagacccattcaggagcccctctttctctgcagaagagagagcttttctcttttctctcgcctattaaacctccactcttttttttatttttattttttgagatggagttttgctcttgttgcccaggctagagtgcaatggtgcgatctcagcttgctgcaacctctgcctcctgggttcaagtgattctcctgcctcagcctcccgagtagcacactacaggtgtgcgccaccacacctggctaattttttgtatttttagtagagacagggttttgccatgttggtcaggctggtctcgaacccctgacctcaggtaatccacctgccccagcctcccaaagtgctggattacaggcatgagccactgcgctcagcctaaacctcaactcttaagcttacttcttgtgtgtcggtgtccttgatttccttgatgtgagatgatgaacattgggtatttaccccagacaacaacgccacttcaatacattcctgataggaattaaaaatgacatggaccttttggaaacagtttgatagtttctcatcatggtaaacatacactgataatatgccccagccatcccattctaacagcaatgggaatttagtttccctgaagaacctgtgtacaaatatccataacagttttattcataatatccaaaaaccagaaacaatccacttgcccttcagccactgaacaaagagtgtcctatccatgcccagaaattctacccagcaataagaggaaacaaggttttgatacagacaacatgggagactctcagatgctttatactaagtgaaagcagcaagactcctaggctcccaatggcataaccccattcacacaactataggaagaaagcaaatctatgggaagacagaaaacagcagtggttttcaggggtcaggagtggaaggaggtttttgaccaccaagggtggctgtggcagtagtggttacatgactctagccatgtgtcaaaactctgaactatctcacgcctgtaatcccagcactttgggaggctgagggggcagatcacctgaggtcaggagtttgagaccagcctggccaacatggcaaaaccccatctctattaaaaatacaaaaattagccgggtgtggtggtgtgcacctgtaattccagttacttgggaggctgaggcgggagaaccgcttgaacccaggaggtggaggttgcagtgagctgagattgcaccactgtactccagcctgggtgacagaatgagactctgtctcaaaaaacaaactgaactaagcaccaaagaaaacaaattctgaaaatttaatgtgattttaagatgagccatgaaaatacaggagtggcaagtaagcacactcattgtaatgtaggcatgctaatatgtaattagggtgactaattacatatattgtttggctaaatatactatgaaaggatgcactaggtgtgaaagtatttacctttatacacatgaagaaactgggcagatgaagggcatatgtagcaccattacttctcactgggtattttattttttacacgagtgaatgtacttctggtcaacaatattatatttaaaaacttggggctgggtgcagtggctcacgcctgtaaccccagcactttgggaggccagggcaggtggatcatctgaggtcaggagttcaagaccagcctggccaacatggtgtaaccccgtctctactaaaaatacaaaaaattagctgggtgcggtagagcgtacctgcaatttcagctactcgggaggctgaggcaggagaatcgctggaacccggaaggcagaggtttcagtgagccaagattgtgccactgcactccagcctgggcgacatagtgagactccatctcaaaaaaaaaaaatcgggactgggaggaggggctcacacctttaatgccatcactttggccaggagtttgaggttgcagtgagctatgattgtgccactgcactctagcctgagagactgagggagactctgtctcaaaaagacaaaatgaattaaaaaagaaaaagaaaaagaaaaagaaacaaaaaacaaaacaaagcaaatgtaggcaccacctgtcaaagagtctcatctactcagtctagagtctgtaggggttcccaggtaatctgatgtgcctagggctgagactcgctttgaaaatcatgtccttgatacgataaggcatgacctctgatgccaactgctcagattcacccctgactccacccttcactgagtgaccttgaacaagtgagttcatctacaatctgtaagatcgatgtgaggatgaaatcagcatttacctgggggagctgaaaagtcaccttctcccttctcagtgatctacttctgttaatacgaccaaaatattcagtgtctgtggaatttccagatcataactgttctatgaaaggtgtctaaccacacctgtatcttacatgaatatttgtgcatctattgctgtgaaaatgagatctctaccccaaaagttacttgatgaagaataactcaatttgttactaatagtcaatgtatatgaagctaattcttacaaagtgagacaaaacacttttattttctaatatgatgtctttttttaaattaagactgatttgaacacttaacacacacattttgaggaccacaaaataatgtttcctaagatgatttaatgtcatggaaagatgctcacagcatattattatatgaacaacctggacagaaaaaaaatgtatgtgagataaaatagcaaatttttttgattgaggtagaattcacataccacgaaattcaccatttcaaagtgtccaattcaatagcatttagtgcactcacagtgtcgtgctaccttcgtcactatctaggtccggaacattttcaccatcccgggaggaaaccccatactgattagcagtcgctcctcagtcccacctccccacagctgctgaaagccaccaatccgctatgcatctcttcagattggcctgttctggaaatttcgtataaaaggacagtacactatgtgaccttttgcatctgacgtctttcattcagtatcatgcattcaaggttcatccacagtgtagtagggatcactgcttcattcctttttatggctgtgtaatactccattgtatggatggaccacattttgtttatcctttcatctggtaatatatagcttggggttgttttcatcgtttggctactgtgaatagggccgccatgaacattcacgcacaagcgtctttctgtttgaacacttgtctcaattattttgagtagatatctaggatggaatacaggactgtggaacagggtcttagggtaattctaggcttcacttttgatgaatcaggggtcattttagtggggtcagagtgggtctctgcagaactcagctcaggggctccacccgcagccaaagtccgccctctgcgcgcaggaccagctccggcttcctgcggggctcggtgtggtcaggcaggacgcggaagcgcagcagcgtgagcgccaggaccaccttcatctccgccatcgcgaacgtctgcccgatgcagttcctaggggagggaggtgggaactctgactgcacccaggagccccatcctggccccatcaagccggtaacctggcctgggacacccaaccccacctagagcagtttgaggaatagagaagggggtatccgtgcctggatccccatgcgggcttgcatatcctgcaagcctagccgagctccaacccccagcctagaccaaggtggggtaggagggggctctgagcacaccacagacccttctaggaccaacccaaccgtactctatggaccttttcctataaactccagaggaggtgagggaaagagagctggaacttggaccatctacaatgtcccccttttccccactgtcatgcccagacccctgcacccatcaacccgttcccacctcagacacaggccgcccttacctgggccctgccgagaagggaataaaagccagaggtgacctctccttgatgttctctgggtcaaagcgaaaggggtcgtagacctggaggtgagaccaagaagggttgttgggtggggtctcccagtccgccagccttggagagacagacagttgtgtgtgtctttgagggaggtgatgttggatactcctgatcaaaaccctgccccctcctctaggagccttggaatggacaaaaacagagagaggggccccgcacctcagggtccggccacacagctgggttgtgatgggttccgaaaacactgatgaggcagataatgcctgtgggagagaagggagcagtcaggagaaggcctccttcactgaggggcccctcttcctacccaggagactcctccccgtgaggctgtgagcacctttggggatgacccggccgtctgggagcacaatgtcctgggtgacatggcgggagatgaccgggactgggggatgcagccgcaggctctccttcatgcacatggtcaggaagggcaaatgggccaggtcgtccctaaggaaacaccccagccccaatccttatcaagggagcaaagacacaattctccagcttctctctgtttgcaagtgagaccttttctccccgcaataaaataaacttttaacaagaattgttacaaagtcgcaagaataaaaatagtgtggcactgtggcaaaaatgagaaaacagacccatggaacatgagggagagctcagaaaaagacatgagaataagtgaaaacttcacatttgataaagacagcccctgctcaaaccaaaatcctgggaaactgatggattttacagttgtaaaagaaaaaagtggatcaatttaacttcacagaagttgaatatgctcaagatggtagtttttgcagataaaggatagtaatgaaaagtaccctccaaaagttgaaaggcaatattttgcaacccaagacagaaaaaaaaaaatcaattttggctgggcgtggtggctcatgcctgtaatcccagcactttgggaggctaaggcaggtggatcacaacatgaggagatcgagaccatcctagctaacacagtgaaaccccgtctctactaaaaatacaaaaacttagcggggtatggtggagggcacctgtagtcccagctactcgggaggctgaggcaagagaatggcttgaacctgggaggtggaggttgcagtgagctgagatcacaccactgcactccaacctgggcgatagagactgcatctcaaaaaaaaaaaatcaattttaatacacattcttaaaagtaaatatttttaaagaatccaaagaaaaagagcaaaaaaataaaggaaccacttccataaaaagaaacaaacatcaacacgtgaaagagatgttcaacctcactcttatttaaaacaatgtccatcaaaagaagaaatatgaagattggcatagattttaaaatttaataatacattagtagtattggtaaagttatgggaaaacttgtgccatcaaactcagctaataggaaaggatttgcaatgataattaaaattgtacagtgcaaatgttctttgattcagcaattgcacttcagggaatttgtcctgcagagatgcttatacatgcaaggaatggtcactgtgcacacatgctgactgcctcatgtccacttttagcaaaaggttggaaacaagccacatacacattgatgggaagatgtttagataaacagccacacgatggaatactatacagctacacaaaaggaggaaatagggatcactagtctcatcacattctgcaggctggaaggtaaatcagtacagacactgtggaaggcaaattggaaatatctactataactgaaaatgtttatgtgcattcaacataggaatgagctgaataaataaggaataaaatatttagcattcagaaaaaaatagcattaagacacactgtcgagtgaaaacaagttacaaatatatacatttgtgcacataaaaagggcaaaaagtatatgaatatatatttatgaaattaatgattcagagatagatgatagattgatagatgacagataataaataagagatatagagagatagagaatagacagatacatacatagatgatagaaacagagatacatagatgatatatagatagtagataggtatatagatacatagatagatgatggatagatagatagatagatagatagatagatagatagataacaaatctatggctctggagacacctttggagaatgagaaaggattaggtggggtggcaggattgtcaaggaaaaagctagtcttatctgtaatatctcatttggtgcaagaagaatctgttcttatcactggttttataatttaatgctcattttccatgtggtgtgtatatacaatggaataccattcagccttaaaaaaaaaaaaagaaagaaaacttattttgtttgccacaacatgaaagaacctggaggaacttatgctaagtgaagtaagctaggctcagaaacacaaacacacatgatcttacttatcttgggacctaaaatagtcaagctcatagaaacaggagtggaggtcgggcgcggtggctcacgcctgtaatcccagcactttgggaggccaagggcggcagatcacaaggtcaggagttcaagaccagcctgtccaatatggtgaaaccccgtctctaataaaaatacaaaaaaattagccaagcgtggttgcgggagcctgtaatcccagctactcaggaggctgaggcaggagaatcacttgaacctgggaggcagaggtcgcagtaagctgagatcgtgccactgcactccagcctgggtgacagagcgagactccatctcaaaaatgaaaaaaaaaagaaagaaagaaaagaaaagaaatagaagcagaatgatggttaccagaggccagggctgagggagggatagagaagggtgagatgttggtcaaaggatagaagcttcagttagacaagaggaatagtttttgagatctactgcacagcatggtgatttagtgaacaatgtattaattgaaattgctaagagagtaaatttcaaatgttctcaacataaaaatgataaatatatgaagtgatggatttgttcattaccttgatttaataatttcaggttgtatacatacatcataacatcacattgtacctctaatatatatatgttctcaacataaaaatgataaatatatgaagtgatggatttgttcattaccttgatttaataatttcaggttgtatacatacatcataacatcacattgtacctctaatatatataattaaaatttatcaatgaaagaacaatttaaaaacaaactcatttttgaaaactcgtattttaagaaaaatagatctcagagataatgtccagaactgcgtctattttgtatagttttctttacaaagaaaaacacagtatgtgttcatataaataaaaatcacagtgtgaattcatataaatgtgggcattgggatagccattttctggaagaatacacagaaaactgttgaccatagtcactgctaaggtggagcttaataaggaagctcatttttatcataaaattttttggaccctttcttttaaccacatccataattttgcttgaaatctggattttatactccaggacatgggtccaggcaaagattttctgtgttaagacctcaaaagcacaggcaatagacaaatgagattacatcaaggtaaaaagcttctgcacagcaaaggaaacagtcaacaaagtgaagaatcaacttacagaatggcagaaaatattctcaaattactcatctgacaagcgattaataaccagaatatattatataaggagctcaaataactcaataggggaaaaagaactcaaatcatcttatttaaaaatggtcaaaagatctgaatagacatttcttaaaataagacatacaaatggccaacagatagatggaaaaatgctcaatgtcactaatcatcagagaaatgcaaatcaaaaccacaatgagatatcatctcatcccagttaaaatggcttttatcaaaaagacaggcaacgatagacactggtgaggatatggagaaaggggaactctcacacactgttggcaggaatataaattagcgcagccactgcagagaacagcacagaggttcctcaagaaactaaaagtagaactaacatataacccagaaattccactactgaaaagaaagagaagaaatttctatcccaaagaaagaaaataaaactgttgaagagatatctatacttccgtatttattgcagcactattcaaaacagccaaaatatggaatcaacctaagtgcccatcaactgaatggataaagaaaatgtggcggccgggtgcggtggctcatgcctgtaatcccagcactttgggaggccgaggcaggcagatcatgaggtcaggagttcgagaccagcctggccaatatggtgaaaccccagccctattaaaaatacaaaaattagccaggcatggtggtgtgcacccatagtcccagctgcttgggaggctgaggcagaagaatagcttgaacccgggaggcagaggttgcagtgagccaagatcgtgccaccgcacttcagcctgggcgacagaacaagactctgtctcaaagaaagaaagaaaggaaagaagaaagagagaaagagagagagggagggagggaggaaggaaggaaggaagaaaggaaatgtggcatgtatacacaatggaatactatgcaccattaaaaacactggaattttgtcatttgtggcaacatggatggaactggaggtcactgtggtaagtaaataagccaaaaagagaaagacaaatatcgcatgttctcactcacatgtgggagctgaaaaagtggatctcatgaaagtagaaggtagattggtagaagggagggaggggtgaggagaagttgattaacgggcataaataagaggtttgataggagaaataaaacctagcacttgatagatcagtgggttcactatagtttacgatatgtactgtatattcctaaatagttagcttatgttagttatgtttctagcataaagaaaagactaaatatttcaggcgacagatatcccaagtacactgatttgatctttaccagttatatgaatgtattagattatcacatgtatttcaaatctatgtgcatctatttatgcagcaataaaaaattgtttgttaaaaatgcagaaaaattattggttttaaaagcagaaaaatgtttctcctcctcactggactgctgtgctgggcaaaggtgtggacgagaggacactgaatccaagacatccgtccattccaatgcttcctctccttcctccagcccctggcctggctctggtctcagaatgtccccactgtgccttcattctacagctggtcctctccagtacgccctccacactagccctagaaagatcttcctggtacccagatgtgacctgtccctacactgctcaaacacttcccatggctccctattgccattgggctaaaactgaagccattaacattttccccaaggcttccacagccagcccctgctaccatctccggttttatcatctcattacaactcagtctctccctctctctccccttctcctcctttctgtcctgaccctgctctctctctctctccttctctctctctccctcgctctcctctctctcttcctccctctctcttcctcccccaaagaccccaggcagtcttcttgacctagagcactgccccccaactgtacccaattatctactgatcattatttaggctctcaactgagacactttctataccccctagtcctgcttctcttactgtaaatcccatctctgcccatgtgggctgggagtgtcctgcccagggacagctccaccaccaggctgggagcacctggaaaacagatccctgggttggttccttcccaggtctccagagcacagaaagatgctgtgcacagatgtgggggtgaaaatgcagtgtgggagtgtttgctgaataaggatgggacggatgaacagtgcaagtgttccggacaagaatggatgaattttacccctaggtctcccttataaaaccctggactcgactggagagtaggaattagggaacagaagagcaaacattcaagaagtgaagatgttcaaaaaaaatgatatttctgggaggaaaggaagagagtggaggggaagttcatttgctgaacacgtctaagtggcgttatctgtcctcacatatcatcaccaactctctcagaagcccaggtctttctgtcctaagggcctataacctttccccagacagtcaggatgggtactaagtcctgcctgtggtcctctgctcctattcccactaggcaatagtggcagaatcaacaaaaacagcttttcctcccctccccacctggggagcagagccaatgagaaggtctcaggaagaggccacaagcacctgcactcaccattcaatctctttaggctcacggtccttcagaagttcttgcacctcctgccggcagcgctcctggtattctgggtgctttgcaaggtggtacaggacccaggagagaccactggccgtggtgtcatggcctggggggcagcaaggcaggcttgggtctctgggctgcttcagcacccgaaggtagacagcacccatgcattgagggcctcagggaggatgggggaagggggatgggaaggttgtgggggtctacccaccctgttcctggaagggagagatcccggtcccctctctagccccacactggggccctcaccctcaaacataaaggtgtcagcttctgctcttatgtcctcatcagataacttcttcccgtcttcatcctggagagaaggcagtaaccccccccaacccccacccccataaaaagtcacactagctctaagggctcttgagtctaatctgagacagtctctgaagattcatcctttttccagaaatccaagtccatcttgcactcctagacccctcttggtcaccatggccagagccctcacctcatggccttcctctctggcttccttgcctcctcttgggttcctactgggaagactcaatgacccatgaatattttaatgaaaagtttctgagaaaaagttactggcaacctgagttacaggagaattaaatggcaatttcccttggaaattagagattaagtattgcttcaaagatttgcccacattctagagtgataaatctagagaatcttatccccctggagacgtttgggttgtaaggctaaggactatggcatctcactgaagaggatttgtttatgctccagaacaaagcacaccatctctcacaaagctaccattctcactcaatctctctctctctctttctctgtctctctcattctctttcttgggaagaaatagaaaatgtgccaagactcataatgtagggcccctctcttaggatgcaaactctgctgcacatacaagtgaaaacattacccttggagaaatttgacttgaggatgaagagccagtgccacaatcccactctggctaacagtattgctgtgagcaagacatgggctgctctgatctagaggtttaatgcatctgtcacaatagacctacacatagacaaagacatagacacagacacaaacacacatagacaaagtcatagacttagaaactgacacagacacacaaatacacataaacatagacataacacagatatagacacagacacacacacataaagtcacagacttagaaacacaaacacacaaatacaaataaacatagacatagacacagatatagacacaggcacacacatatagactaagtcacagacttagaaacacagacacacaaatacacgtaaacatagacatagacacagatatagacacagacatacgcacacatacacaaaaacacagacttagaaacacagacacacataaacatagacatagacacacacacacatagacaaagtcacagacttagaaacacagacacataaatacacataaacatagacatagacacagatatagacacagacacacacacatagataaagtcacagacttagaaacacagacacacaaatacacgtaaacctagacatagacacagatatagacacagacacacacacacatagactaagtcacagacttagaaacatggacacacaaatacacataaacatagacatagacacagatatagacacaggcacacacatatagactaagtcacagacttagaaacacagacacacaaatacacgtaaacatagacatagacacagatatagacacagacatacacacacatacacaaaatcacagacttagaaacacaaacacacataaacatagacatagacacagacacacgcacacatagactaagtcacagacttagaaacacaggcacacaaatacacataaacctagacatagacacagatatagacacagacacacacacacatagacaaagtcacagacttagaaacacagacacacaaatacacgtaaacatagacatagacacagatatagatatagacacagacacacacacacatagactgtcacagacttagaaacatggacacacaaatacacataaacacagacatagacacagacacaaacacacatagatgaagtcacagatttagaaacacagacacacaaatacacataaacaaacatagacatagacacacacacatagacaaagtcacagacttagaaacacaggcacacaaatacaaatacacataaacatagacacagatagacacagacgcacacacatagatgaagtcacagacttagaaacacagacacacaaatacacataaacatagacatagacacagacacacacgcacatagacaaagtcacaaacttagaaacacagacacacaagtacacataaacatagacatagacacagatatagatacagacgcacacacatagatgaagtcacagacttagaaacacagacacacaaatacaaatacacatagacatagacacagacacacacgcacatagacaaagtcacagacttagaaacacagacacacaagtacacataaacatagacatagacacagatatagacacagacgcacacatacatagactaagtcacagacttagaaacacagacacaaaaatacacataaacatagacatgacacacactcagacacaactactgatagacataaacatagacatagacagaaacagacacaagcacaggcacagacaaagatatagacatagcattgacatagacatagccatagacgaagacatagtcatagacacagacaaaaaacatggacatagacatacactgagacaaagacacaaacacagaaaaaagacaaaggcatagacgcagacacagatatacacatacacatagacatggatgaaaatatagacagagacaaagacataaacagagacatagaaaagacaggacaaaggcgtagacatagacaaagatgaagacatagataaaaagacatacagatatggccaattacaaagacaaagacatacacatagtcacagtcatagagacacaaactcaaacagagacaaagatatagaaagacataggcaaaaacataaacatagaccagacatagatatagatgtagatgtatggagttaaatgtggacaattaactcattagtttgtaaatagagcaaactctcagacttgtcagtttcaagcctagcagctccctgctaggtgcactccacagtcatctctaaaacctatctctgacctgtccctcccttcctcaatcaccttccatggctccctagtgccctcttaatcaagttcaaatcctttcatctgacatttcacatgaagctcccttctacttcttgaattcagatcccagagaggcccaccttgctcagcaggagtacatcaatgaagtccaaagtcttggatttggccttggcttggaggaagtcatcaacaccctggctagggagagtgcggcgccgctcctggatgacggcatctgtgaagtcgtgcaccaggcggcaggccctgcggaaacgctgcccatcaggggtgagataatacaggaagtcaatatgcaggaggatctcatggtgtctttttgatacaagggcactgagctccaagatggcggcaatatattcactgggtttcctgcaggataagggcagaaagggaggcaacaatttaatatacctgaagccccaggatcacctcccaccagcagccaggatctacctcctatcagtaaacagagtatccaggaacagatgaccccacagatacagggtggggatcagcatgagattgattctccaagctctcttctctccctgcatcccatctctgtgagatgcctccatgccgctaggcacccagagcatagcttgcacattattctcctattctctctttccctcccagtatacagtcctgacccgtctccttgaaactgtccacaaagctcagactttatcctcctgcaactggtccatggtctagctttcaccctagcctctttgcatcagtgttaactccatttagtgctacattagtcagtcccctacagagctctgaccacacccaccagttcaaaccccttcaatggctccctggaaacctcaagataaagttcataccagtccttcaatgatcaggtataacaaaactcctccaggaaggtttgtctggtttccctgcttagtcctccctctcccacctacccactttgggtccacagcccaagatcccagatcctgggcaagaacttactcctgacaatggctgtcaaagctgaagacacatttctgtagactgtccaaggtcatgaggctgatgtgctcaaacatatccaaacaggcactaccctctgaggccaggagctgccacttggcctagccagagaaggggacagagctggggcaggctccttgctcccttgagcacctctccaaccccaactgccaagatgggctccccagaataagcctcttcatcttctccccagggacccctccccagggagcaccaggttatggtgcaaacaaaagctgttactattaagagatgaagacccaagattgggagttaggagaactaggttcaagttccagctctgtcccctgtgctctgtgtgccattagtcaactcattaccctcccctatatcctgcctgtcaaatcttcagaaacagttaagatgatgtgctttggagccatataattcacattagaaactctgctccacctcgccatgctcacttattagctgggtgaacttgggttagttccctaatctctcagacctgcagtttcatcatctaccatggggcaaaaatacataatctctccttcgcagagctgttaaaatcaaattagacaatacatactcgtatcatggaatgggcacatggcattgtttctggcatatggtatgtgatcaataaatgttggatttccccgtctgcattgttataaattgatttcaaaaatatccctgttttgggggaggtagtccttcgttgagtcctgagcattctttctgggcatgtcatgaatgcaagacactgatgtccttaacatggaaaatttctcagagttgtgtttgcgaagaaaaactttgagggataaggtaaagactccctctagacatgttgcttttgctttctataaaagcagattccctaagcttaaagctcctcttctgtaatgcaatatatgatgtcagcaggcacttatagaagcccacctgtgtcagcccatgggatttgggaagcttggagggaaaaaaggcaatctaacaagaaacacatgctgctgtctgtgtcatgagtagtaaactatcctttgtctctgacccaggagtctctcgtccttctggaagaatttatgaaacagtaacaagctaacttatcaatttgcaagttaaaaaaaaaatcctagatacttcgcaaaacctttgccacaattcttcccttcctgccatatccacaccctttgcaatgtgatttttcagcaactcccattaatagacagagcctattttatccccctgcctttgattctgtgttggacttttggctttcgatgtcaaaatacaatgtggtgaaaatgatgagttaataactaacgaagctaagccttgtcttactccttggaaccctgcctgcattgtgaaccatggcgcgccttctggaaggagacaatcatagggaggaacatccaggggtcccagatgaggccaaacctagacacgtgagagaacccaaacatgtcccagccaaaacccaaacatgtggcagaattcagtcaacacctgcaaggctgcctacctgacccccagctgctcatgtaccatgagtggtcccttccatatacagaagaacctgccaactgtcccaaagacttattagcaaacataaacacttattggtttaaaccaatgagttttcaggtggtttcttatcagcaacagctactatgaaattgttgtcatgaccctcttgtgtttacagggctttggtgatggaaacatagaaacagacaccttctgggcacctgctatgcaccagagacgtgactccattacattactctgaccatcttttaagtagggattattatccccattttacagatgaggaaaccaaggctcagtgagaaagagcaatggcccaatggcacccagcagagccaaaactccagactagatctctctgttgtcctttcaccccaaggctgcaagtgggaccttggcttcaaataactcacgtgcatgatgttcacactctcattgaaaatcttcatatagggcttcaggatgttgaaatggaaggcaggcgtcagcatccgacggtggcggctccacttgtcaccagcactcagcaggagcccatcccctagcagggcagccaagggccatgggcaaggacctctccctcccctggccccccaacgtttttcccaaccctgttcacctgcagatactcacccagccagggctccaggaagctgtagaagaacttgtcctttggtgcaatggcagctgacataaatgaggacaatcaggggccatggaggcaggtgaaagagggactttgggggtgggtggaggctcccagcaagaggtttgcacttctcccactctgagccccacatagcaggaagagggccaagggcagaggaagaagggaggatggggaggggagggaagaccagaccaggctacagcagcacagtacagcaatgacactgcctaacatggcgtgtaggagctatgtcagggttccagcatgccttgacatgcctcctacacgatccaacatgttccgcaacccctgagcacagctcagcattctacagaatgcttcacaaggacctaggacaccctgtctgtcccagcactctctgacatcttctgatatggcatcttctgacatggacctggacatgagacatgaccctgacatgtgttcacatgtcctgacatggccacaaaatacatgacaattcctaacatgagatggtgtgctctaacatgcacatgagatggtctaacatgatcttaaaagcgtgttccacatacaggctctgggttgaatataaatatggtacctttaatgtcacagacatagccaacatgtgaaccagactgttcctcaggcatgacccaaatatactataacacatgcctcagacaagactcaaataatgtctcagacagttcacatagggaccctgggtcccagacctcacacaacccccagacctcacacaacgcccagatgtttggaccaccaggagaaaacggcagtgtcaaacagcacctgagacaagaaccaaacaggccctcacatgccccaaatgtccttggccacagataagccccaaacttgaccagctctacatgaccccagttggaattatataccagatgtaaccaggtataacatatttcaggtgtaaccaggacccaggtgtaaatatacaaggcagacctggccatataacagccattgtagagacacgccccagacatgagcaaacagcaacagaggttagacaggtggaagtccaggggcgatggaggcaatggcatctccaccacagcccctcctgtctgcacatcggtcacgtgttcagctggaggcagcacagcaaccccagctgtgggcaaagcttggccagtgcgatgtctacctggagcaaagagcacaggcttgatgcacgtggggagaaagatgtggatgactgcctgccagggccccacccaccagcagcccatatccccaaaggtgcacgccaggctttgtgtgtataggagaccttcttctgagctgtgaatctggagaaaaacacacaggacccaattcatgctctcctaggctgtgagagagaaggatctgcagggaagaggtcgaagccctctccctgagaatttcaagcagcatctcatcctcctgtcagtgctgagcaccccctgcctcctcacatcctccatgcaggactctccagtccttcagttacacagacagaaaaggtctttccccatgtggatccacacaccatgttccctgggctctcattcatcccattttccagatgaagagcctgaggctctgaacaataaagtcacttgcccacagtcccagaccacggcaagcctgaggcctaagactaggtctgtctgcacccatggcctgaatccttaaccaacaaacttctttgtgcccccaaaacagtagctctggaagacccaggcctaccaagactgggcaatcagagacacagggattgggtgaaaaattggtcctgtgatccaggccaggagaagtaaaccatgggccatttctgggaactctaggggaaaggtggcctttcccataagaactgagcttctgggactcatcgttgacatcatgaggaaaaggccaccttgataggaaaagcgacatggagaaagctaaagccaagagagaaagacagatttccagtgaccttgtgtgagacctggatccagccatgcctgaaggccaccctccctggactttaaagtcaatagattatctttctttgcttagaccacaccaggttgggtttccaccactcacaactgaaagagacttcaataaccagagacagctgggtaccagcccagagtcactcagcattttgaggtcagagccatggtctctgtaggatgctgcccattccccctgctcagcctcgcccgtccaacgatgggaagcacaggggtcaaggaaagggacccaagctggggtggagtctcctcttggagatccccgggacctgcagcaggagagcaacgaacttagggcagacaagctataggatggggtaaagggaattgacccaccagaggtggacatcatggaagtagcagcccagatcccccaccagccacaagtcctcctcattgttctaggctttgggacaggcaaggtgatgctaggcctggcaaggggccttgaatactaacgatgtccaattgcctcaccctgcactctcctttcaaacattcctactcattgttccagacacagctccagtaactcctcctctaggaagccttccagcctgccccagcagagaccttgttcttccctgggctgtgatccatctccctctggccctttcctgatcccatgaagttggggatatctctatccaggtccatctccttaaagttgggggttcctccaggactgggccttgggttgaggtctcttagggttccagggcagcccagaacaccagaacagggggtagatggcaatagagagaggagacgctgagatggaaattgatgaatacatgaaagaaagatgaagatagctgagagggaaggaaaggagaggccagagtactgcagggcccacacaggagcttggggatagcggaagtgcaggcctcaaatgcactgccccaccagctgttccagatggtacctgaggcgttgatgacagaccggatgatgtcggggtggcacaaactgaggaggggggagatgggtcccatccagaccttaaagccctgggggtaggtggccaccagctgagtcagaactctcatgccctcctctgtggggttgacctgcaagcaaggcaggggtcattaccttctgtgatagttaattctaggtgtctacttgactgggctaagggatgcccaggtagttggtcaaacattatttctgggtgtgtctaatctattcatcctatctatctaatttttctatctatatatctatctgcctacccatctatccatcaatccattttatctgtgctttcatccatccatatattcatctgtctgtctgcttatcatctattaatagccatctatccgtctaatctatccatcatatatatctactccatctgtctacataatctatccatcctatctactctatctacccatccatccatcatccatccatccatccatcctatctgtgcatccgtgtgtccatgcatccatatgtcctattatttgtctatctatctatccatccatccatccatccatccatccatccatccatgctatctgtgcatccatgtgtccatgcatccatctattctattatctatctacctacgtgcctgtccatccatccatccatccatctatccatcctatctgtgcatctatctatctatcctattagctatctatctatctatctatctatctatctatctatctatctacattcctcctgctctatctatctatctatccacattcctcctgctctatctctcttgggtccatctccaagtcccaagggtgcatcccagggcagagggagaagacgcactgtccactcacagaggcccagttatcttgagaggaaggattttctttttctgggagtcatttcagcccagaggcagctatatggggaggtcctcacaggggagatttgtggggagcagtatcgcctcaggacatgtccctaaggctggtccccacatgccttcatgtcctggctgatccacagaggctccagttcctcccatggagaaggttctgcacatgggagaccttcccttttcagcagccactagtggagcagaggtgactctaactgtccatcaggacaatggctcccacctgggagcagcttctgcagcaggctctgtgctagtgtgtcctgtgcacccttccactttatctgtggacacatccatcaatcctgccatttgcaaatgagcagactaagaccacattccccaaagaggagagcggtctaagtcagagggcaaggtcacggggaggagaaaggccaaggaaagcttctgaaaggtgaagtgagtggccaacttttatctgggtttggcaacaggtctcattgataagagggagataagaagaagaatataagagaaaggtgccttcgggtgtagtggaagtgggagacggcccatgcctctcctctggcccagctgtaccctcataacaggaaatagtccaggcaaggagaggaccctggacagtgggcataagaagcctcgagtccagcaatggagaatgtgggaatgccagggactcgcctctctgtgcagccaaccctctgcccaggagccccgcagaggtgcattaatgtgggaagacaggcaggaaaaggattcaatgcaggcctggagtgggaggacaaggaagtgagaagggcttgcgtaggcacctcacagaaatgaataagcagaggaatgagtaagatgcctcctctgcttctctgccaccccagatcccagcccaccccttcacccccactccctaagcctcgtacccctcaggaagtccatccatcctgagacctagacccatcctgctgccacactcaccatgccctggtgtccccaaaaccagttccgtcttgggggttgtgggaaacaccgaaggcggcggcagttgtcatagaaggcgtaggtccaggccaggacatgggccaggagccaggaggccccgaccagcaggaggagcagccaaggggatgctgccactggccagaggcccagccaggacaggctcagctgggacatcctgcagggcagacgggatggacggtgagatcctgaggcccagagaacggcccagggacctccagggacagtggagaggcagggacgggcagtgccggaggtagagcagggagggctcagggatgggtaaaaaggggctgagaggtaaagtccagaaaggcccaaccaaaaccagcagccaagtggcctccagttccctagtaagcacttagaatgggaaagagagagagagactgattaaagtccagaaaggcccagcctgaatcactgtgaggttgccaggggcttggtttcagttactcggaaaccacccatcctccaggccagcacccaggagctgcgtgggccttgggcagtgcccctctccatcccaggccaggaccccccccaggcctgccacccccagcctggcaccttctgtcaggagcagtctgtcccagacaacctcctctctctgtctgctgggaggcctttgaccctggcccttgatatagcaaaggctgtgggagggctggctgggttgggctgggccaaccaatccctgcagcctggatgtgtctcctgagcctgggcagccaatcaacacctggcgtcaggccagctgggtgcagaggaatcagctcagggtccagatggatgggtagatgcacagatagatagagtagataggatggatacattaggtagatagataaagtagatatagataatggatatattagacagatggatagatagctattaatagatgatagatagatacatagataataggataaatagatggaatggataaacgtacagctaagatggattgatggatggatgggtaggcaaatatatatatagatgagaaattagatagataggatgaatagattagatagacacacccagaaataatgttccatctctgtcccagatatgtgggatcctcatttgtgacatgggaactagggatcttggatcactccaatcactccagatgctacaaggccagtgacttactcagtatgatgctgaggaacatgaccatcagaaacaggatcagagtcactctcaagcaaaaaaaaaaaaaaaaaaaaaaaaaaaaaaaaaaaaaactccaaggattaaatgatttttcccattgtcctggggagaaattaatccaagggaggtcacaggagggcaaataattccccatcaccaccaccaccaccatgagcataccatcacccatggagttttctgatttactctttggcccattaagcgtgaaatttcttatgctaggtttctttctgataagggagaagagattagtatctctacatttcctctcctcctgctacctagtctctgtattctaggttaaattataatttatgttgaggatttacaatggctgatacacctagctgagccttctgcacagagatacattgggagtggaggttaattgggtcaaaggagaaatgccataagcccacactccagcctatcagggtggattaaaggtctgatttgcccaactcttgtcacacctgctcccactgagaggtgacagcatgctggcagtcctcacagccctcactcgctctcggcgcctcctctgcctgggctcccactttggcggcacttgaggagcccttcagcccaccgctgcactgtgggagcccctttcttttctcttcttttctttttttttggatttttttattattattattatactttaagttttagggtacatgcgcacaatgtgcaggttagttacatatgtatacatgtgccatgctggtgcgctgcacccactaactcgtcatctagcattaggtatatctcccaatgctatccctcccccctccccccaccccacaacagtccccagagtgtgatgttccccttcctgtgtccatatgttctcattgtgtagggacatggatgaaattggaaatcatcattctcagtaaactatcgcaagaacaaaaaaccaaacaccgcatattctcacttataggtgtaggagcccctttctaggctggccaaggccagagccggctccctcagcttgcagggaggtatggagggagaggcgcgagtacgaaccggggctgcgcgcggcacttgcgggccagctagagttccaggtgggcgtaggcttggcaggccccgcactcggagcagccggccggccctgccagccccgggcaatgaggggcttagcacccgggccagcggctgctcgggaaggtgtactcggtcccccagcagtgccagcccaccggcgctgcgctcgatttctcgccgggccttagctgccttcccgcggggcagggcccaggacctgcagcccgccatgcctgagcccccggcctccgtaggttcctgtgcagcccgagcctccccgatgagcgccgccccctgctccagggcgcccagtcccatcgaccacccaagggctgaggagtgcgagcgcacggcgcgggactggcaggcagctccacctgcagccccggtgcgggatccactgggtgaagccagctgggcttctgagtctggtggggacgtggagaacctttgtgtctagctcaaggattgtgaacgcaccaatcagcgccctgtcaaaacagaccacttggctctaccaatcagcaggacataggtagggccagataagagaataaaagcaggctgcccgagccagcagtggcaacccgctcaggcccccttccacattgtggaagctttgttctttcactctttgcaataaatcttgctgctgctcactctttaggttcacactgcttttatgagctgtaacactcaccgcgaaagtctgcagcttcactcctgagccagcgagaccacgaacccaccagaaggaagaaactccgaacacatctgaacatcagaaagaacaaactccagacgcgccaccttaagagctgtaacactcaccgcgagggtccgcggcttcattcttgaagtcagtgagaccaagaacccaccaattccggacacaccattgtctgagtaagtttgggtgccaggactatgaggtcgtgtgaagacttccagccccatacctgcagaacagtctgcagctcactctgctctgaactgccccaactttgcacagatattctccattcctcgaaatgaaactgtatccttcaaagctcacacatttcgcttattggctcagcgtagggagcaagttctctagatagcttactaccaaataaaatggtggagaagggaacccaggcagctgggcacaaaaaaggaatgagcaacaagcttcctctctgaacatgattttctgtgtaaggtcttggacactccctcgactgcttccagccatctgcctcatgctaggtttctagttaatgtggaatgaaaactctcacatcttccttctagatgtagctgtggtaattgcaacttaggcagttgtgcttgagaatcttcttcttaataccacatggcaaggtcattccccaatgcttttatttaccttcacttgaatttttatattaaacattggattgaacaagaacggagaagagaatcacaattattgtgtagatgctacattgtagttacattttctcttgtaattattacagtgctgggactattcgagctttaaaatcctttctgaagatcctaaagctactcagtggttctgctggcattaggggttgatatggtttgggtctgtctgtgtcccttcccaaatctcatgttgaattgtaatccccaatgctggatgtggcgcctggtgggaggtgtttggatcatgggggcggatccctcatggcttgatgtggtcttcgtgttagtgagttcttgcaagatatggttatttaaaactgtgtagcacctgaccctctctctcttgctcctgcttttgccaagtgatgtgcccgctcccactttgccttctaacacgagtaaaagctccctgaggcctccccagaaccagatgccactatgcttcctgtacagcctgcagaaccgtgatccagttaaacctcttttgtttacaaattacccagtctcaggtatttcctttttttttttttttttttttggtcttaaactccaagcctcaagcaattctcccaccttggcatcctaaaatgctgggattacaggcatgagccaccatacccagccaggtatttctttatagcaacacaagagtggcctaatacagagggatattgccaatgatttaatagtagtcttcttttctgtatgtcactctgcttgactaaccttaaacagtctctttaaataatttgtaagattcacctaactacacttttcatattgtccttcaatccttgcacttatggcataaacatgttttatgattattatataggtatttaaataatgcatatgggtcctatatttctctatcaatgttataatttttaccagctacataattttgaatcacatgtatataccatcatttaccttccatccatccaaaagatacgagaaggggaaagaaaagaataaaaggtaagtgctaatagataatccgaataggcctatatctattaaatcgattgaaacaataattaataaccttccaaaacagaaagccaagaccccaattggttcactgattaattctactagacttttttttttttgagggggtggcaaaagagctttatttacacactggcacaaggcccgccgggtgtcagctgaagaagtaggtggaacgcttcaccagctccaggtcgaaggcccctggcttgggcaccacctgcagtgtctccttcatctggctggcctccaagatcttctggggctcagagcagaaccgcctgaccaggaacctggacaggtcctgcaggatggactcgctgtgcaagcaaactgctcccggcacacctggttcatgatggagacatcagctgcatgggtccggtaacagtcgtgcacagagacgaaggtcaggcccttcctgtagcagtgcagggtggtgagcatcatgtgtgaggagtccagcgagtggatgaagttgggccggaagccgttcttctgcttaggtgtgttgggcttccggctgatgtctctgttgtgggtgtaagtgatgctctgaattccacctcctgattgcttgaccttggactccaggcgatacggctggatgatggggacgcccaggggggtgacccactccaccacagagcccgtgtgggagacgaggtgggcgctctcgatcagccagtgctggatggcccgggtccccgagaacatctcctgtagactcctgaagacctggcgtacgaggtagtgggaggcctcccacacgaactcctggggaaagtcgttcagctcccggaggcgcttctcaatctgcaggcgcccaccgtagcgggtgaccccgtacaccacggtcatcactgtctgcttcaccaccttgcgggtgatgaaggcttccagcacctgtgccacccgcatgccccgctgggcgtcctgcctacggaacacctccacctgcgcggccacgccgctgtacacgtcctgcggcacatccgagggctccaggttgactgaggcggcgcccacgctgtcgcggcccagggcagcataatgctgtaggccgttgcatctactaaacatttaaggaaggaattataccaattttcttccatgtcttttgaaagacagaagcagaggaaatattgcctaattcattttatgaggccagcattatacctaatggcaaatacagacaaagacatgacaagaaatgaaaagagaaagaagaaaagaagaaagaaacaaaaaaactatacagattaatattgctcacaaacctagatgcaaaatcctcaagaaaatatcaaatcaaatccaacaatgtataaaaataattacatatgttaacaggggtgagatgacatcttatcatggttttgacttgcatttcctagatgattagtgatgttgaccattttttaatgtatgtgtttgccatttgtatctcctcttttgagaaatgtctattcagatagtttgcctattttttaaaaggattattttgaggtggtttttttttttgctattcagttgtttaagttccttatgtattctaattactaatcccttgtcagatggatgatttgcaaatattttttctcattctgtaggttgtctcttcactttgttgatttgtttctttgctgtgcagaagctttttggtttcgtatgaccccgtttgtctatttgcttttgttgcctgtgcttttgaggtcttaccaaaaaaaaaatccttgcccagaccaatgtcctgaggtgtctcccagatgttttcttctactggttcaaagtgtcgtgtcttgcatttaagtctgtaatctattgtgattgttaatattgagtgtcaacttgattggattgaaggatgcaaagtatttttcctgggtgtgtctgtgagggtgttgtcaaaggagattaacatttgagtcagtggactgggaaaggcagacccaccctcaatctgggtgggcacaatctaatcagctgccagtgcagccagaaaaaaagcaggcagaaaaacgtgaagagactagactggcttatcgtcccagcctacatctttctccctcgctggttgctttctgcccttgaacatcaaactccaaattcctcatctttgagacttggactagtttccttgctcctcaccttgcagacagcctactgtgggacctcaccttgagattgtgtgagtcaatattccttaataaacccccctttatatgtacatctatcctactagtctgttgctctaaagaccactgactaatacagattttggcaccaggagtggggttcatacatctatcctattagttctgtccctctagagaaccctgactaatacagattttggtaccagaagtgggattcatacatctatcctactaattctgtccctctagagaaccctaactaatacatctatcttgatttgatttttgaataggatgaaagagaggggtctagtttcttcttctaaatatgaagatccagttttttcagcaccatttattgaagagactgtttttttctaactgaatggtctttgcacttttgtcaaaaattagttggctctaaattcatggatttatttctgggttctctgttctgttccattggtctatgcatctctttttataccagtactatatggttttggctatagcattgtagtataatttgaagttggcagtgtaatatctccatctaagttcttttttctcaggacagctttggctatttggggtcttctgtgataccacacgaattttagaatttttttgtatttttatgaagaatctcattggtattctcataggaattgcattctatctctatattgcttttagtagtagagtcatttttgcaatattatttcttccaatccatgaacatgggaagatgttccatttttgagggaccttttccatttctttcatcagtgttttatagcatttcttgcagagaactttcaactacttggttaaatttattcctaaatattatatatgcacctattgtaaatggcattgctttctttttctttttctgctagctcatcatttgtgtatgggaacactagtgatttttgtatgctgattttgaatcctgctgctttattgaatttgtttaccagttctaagacagttttggtggagcttttagggttttctatgcacatattatgtcatcttcaaacagggaaaatttgacatccttgccctttatttctttctcttgcctgatttctctggccaagacttccagcactatgctgaataaaagtggtgaaggtgggcatacttgttttgttccagttcttagaggaaaagctttcagtgtttccccattttgtatgatggtggctgtggatttttcatgcctatcctttattttgttaggtatacttgttctatatatttattttgttatgtatgcttgttctatacctactttgtttagtgttttttatcatgaagaaatgttgaattttatcaaatgcttttcctgcatttattgagatgattatatggtttttgctattcactctgttgctcttcaataaatatgatgtgatgtcattttttttatttgaatatgtcaaaacatccttgcatccctgggataaatctcaattgatcatagtaaattatctttgtagtgtgctggtggatttgatttcctagtatgtcattgagaattattgcacttctattcatcagcgatattggtctgctgttttcatttcttcttgtgtcccattctggttttggtataagggtaatgctgccttcatagaatgaattaagaagaactctcttttctttgattttttggaacagtttgaaaagaatgggtattaagtattttttttaatgtttggtagaattcagcattgaagccatcaggtcctgggcttttctttgatgagagagtttttattactggttatatttcattacttgtaattagtctgtttagactctctatttctttttggttcaatcttgataggttgtatgtgcctgagaaattatacatttttactaggctttccaatttgttgactcatggttgattgtaatagactccaatgattctttgtatttctgtggtatcaattgtcatgtctcctttttcatgtctgatttcatttatttgagtctttcttttttcttactttgtttagctaaacatttgttaattttgtttatttttttacaaacaaaactctttgttttattgatcttttgtattttatttttactttcaatttcatttatttttgctctgatcttcattagttcatttttcctactaattttgagtttggtttgcttttgtttttcttgttccttgaggtgcatcattagattgtttatttgaaatatttctacttttttcgatgtaggtgtttattgctataaaattccttcttaatactgcttttgctgtatcccatagcttttgatacattgtgtttatactttcatgtgattcaagaaattttaaatgtacttcctaattttttattaatccattggttgttcaagagcatgttgttaattttgatgtatttgtacagttttgaaagttatttctgttattgatttctagctttatttccttgccgtcagaaagtatacttgatgtgatttcagtacttttaaacttgttgagacttgctttgtagcccaatgtgtggtctctccaggagatttttccatgtgctaatgaaaaaaaatgtgtattctgcagctgttgcatgaactattctgtcaatgtctgttaagtctatttggtctaaagtgaaatttaaatacaatgtatctttgttgacttcctgtctagatgatctgtccagtattgagattgggttattgaagtctgcaactattattgtatgggagtctatctctccctttagatctaataataattgttttctgtagctaggtgctccagttttgggtgcatatatatttactattgttatatgctcttgctgaatttatcccttgtctgttttatttttatctgatataaacatagctactcctatttgattttggttcccacttgggtagaatgtctttttccatcccttcactttcagtctatatgttttttgataggtaaagtgagtttcttatgggaagcacatagttgggtcatttaaaaaatccattcagccagtctatatattttaagtgggggatttaatctgtttacattcaaagttattataggtaagaaccttcttctgtcattttattcattgtttgctagttgttttgtatatcttttattcctctcttcctctcttattgtttacgattgtggttttggtagttttctgtagtaataaggtttgattcttttctcttatgtgtatctgctttgccagtggattttatacttttgcatgttgtcatgatggtaatgatcctcttttcacttccagatgcaggactcccttgaacatttcttgtaagacaaaaagctcaatattgtcaggatgtcagttcttcccaactaaatctatagattcagtgaaatcacaatgaaaatatcagaaaggttttgggttttttttttacaatttaaatttttactagagaaagatattattcacatccacaatttcttaaagtcctttataaatgagtgtattccataagaaatacactaaaatcattacttatgtttcatagagggaaaaaactatgagaatactattaacccaaactatatccatattatacttatttcttaagcatttacatgttcaaatacgcttgttggatagtgatcattcatccccacagtggtaaatttcagcataatattaagtgactgagagagactaaagtagtcacatgtagattagataaacagatacttattctgttatacctaagcttacttataaagcaacataaaatgagcattggataacaatgaaaacaaatgtaaacaaacagaattaaatgttactcccttccctgaaaaacaacagataaaagggcttcttgctttattgaatacaaaacatgatctattgtaataaaaaggtaagacattgattttacaaaattatatttccaaatacagataaaaaaatcttgaacagttaattcagattttattgatctaaaatgtgcaaaatatctgataatacttaagtttattaaattcattgtacataggctgatatcatcccatacaaaaaaatgctcagtatcttgttaagattcaaaatagtgtttaattatctgagcttaagatttattgaactactatccaaataacaacaaaagtccatattgtaaaagaaaaaagtaaaactaaaaattttctgattattaattgacttgaaattcattcccattaaaacataaaactatagccaatatccatttgcaaagtgaagaaaaactggaagtccccatgataaatacaccaattccaaataaaaaattaaaatcaaattttgctattacaaaacacacatgatcttttaagttattcaggtttaatagatttactaaggatagagttcatagagcatgtatttggtacttctgtttagactcaggtatttgcaaagtaccccaagagaaggttgagaaggtaaaataaacataaaattgtgatacttctctccacaccacaacaaaggtgcttggatttaaaaattcaatttgtaactctagaagaaaaagagaaacaatttacaactccaaaatattttccagaaaaatgacaaaactggtaactacctagaaatgttattagtgaatcaaagtgcaagtaatgacagcattaacatcaaatgtatttgaagactcaaagttttaaatgttttcaatgacaactagttgatttttctaaggtggtaggtgtgaaataaagataatacaaatctaatttttccaggaactatagcactgcccgtccccatgaaattaaattataatttcactgttcaacataatataaaactgttttgagtaacagtgaaatagaagcatgaatttagatacacaccagccctatatgatggacttattcacacatagtatttttgataacaacctaattagatactgtctttcattgcttactataattctgagaaaccacttttaacagtatacatttacactaccacttaactaaatggggacatataaatatataaatttttaaagaaaaaaattccagttatttagaggagaaataaaacttcaattatttacttttttgaaactgcatttagataaaaaggtatatggtttatgatacttttcacaatgtaataaatttatattccaattttctcataaacgagaggttgtaaagcaaaatatttgttccttgaaaataacctctctcttctaaccctggtaagaacaatgagtgtgcccttaatttcaagactcttgttgtcatccatgtcaattgtctttttcatgaagtataatattttgagagagagagagagttgtaaaaattaaagagaaaacctgcttttggaatgcagcaattctaaatcatttcactaagaagcatcctttgatatgctggtctgaatttttaatataaaacctaagcagtacttatttctgaagtagaactttctccagttttaataacttcatacatagcaagactaaggacatcaacctgtgcttttgagattttggtaggtgttctaataatgtattattttagatatggctcattgtcaaattgggtggacagagatttcatgaattggttacagaaagctaactaaactcttaatgactgaataatggtttgcattttgcttgagccaaaaaagatgtttaagccatgtaccactacattccctgcttaacattcctaagtttctttattcttcatagttttctaatgaacatatattttcctgagtaagattataaaaaagttaacctttcttccaaaagtataaagacaaataaaatgtcgactcacaatacatattttttgcatagcattaaaggtgcggagatattgcctgctcctcttcattatgattggcccacctcttaaaaagactgcaacaggccgggcgcggtggctcacacctgtaatcccagcactttgggaggccgaggcgggcggatcacgaggtcaggagatcgagaccatcctgcgtaacacggtgaaaccccgtctctactgaaaaatacaaaaaattagccgggcgcggtggcaggcgcctgtagtcccagctactcgggaggctgaggcaggagaatggcctgaacccgggaggcagagcttgcagggagccgagatcgcgccactgcactccagcctgggcaacagagactccgtctcaaaaaaaaaaaaaaaatactgcaacagatgattcaattgtctaaaatacttcgaagtacagaaattaaatgctttagcccataaacatatcccttatctactgtgttgctaaggaacatatcagccatatctatcatgcacacttcagcagtctcttggcaaccagtgggaagatggtagacaactttttccagttgggaaagtacatttccatttaaatgttcctgtgacatgcttttccacccattgtcttgctctagattttcaactttcaatgaagtctgactgtgatacttttttgtatacattttcctgtgatgggcatacatcttggacaagcttttgcctactgaagcctctatttttccattcactgtggaagttaatacatgaaagttattattgcactctagtacttctgtgtctgacagttgtcctttggacaaaaacttttctgccaaatttctgtcattcagttttgtagtgattggctgagatgaaccttcctaaagaaacagtaatgaacttgcgtaaaagttaagctgcttctggttttcaaaccactgcagaattttctcagtcttctgaataatggcagcaacagcatcttttattaagcagtacccattatgaaaaaatccgaagactccatcctttatagcttcttttgttaagcttcttccataatgttggtttgtgtctcatagctatgggaatgaacaagataaaccctcatgccaagcaccaagaacccaatctcttccattaatgggtccttgctgacctattgctgaattttctcagatgaggcaaaaaggatcatagcttttttgccctgtctttacatccattatacagggcttattaaatttatgggtcacattttccagttttaggtataaatcgtttggggcagcgggaggtggccagatgccataatattttggcaaatattgtcgtagctctagaagaacaccatcggtacagtcagcagcataaaccatattatagaattccagctctcttgggccccttggaggtggttgtaactgtttcaaaactgtgccatctggatgttgcagtatacccattttgtccttcccatacctgtgcccggccacctgatgcaagatgggcacacagccactgaggaagcggagtctgccgcctgccggctgcagggtgcccttaggggtggcctcgatcgccggtggggtccgcatttctgggggacccggcgcctcgacccggagcggggatggtggctctcttgccataacggagaacagaagcggtagggtcagcaagagcaggaaaagaaaaatagggggagggagggggcgccggagaacccaggggtcgctcaggctcgggcgcgaggaggcccgggggttcccgcggctggtgcccgctgaggtgaggggagggggcccatgacgccgcggcggcgcgggcactccctctgcccaactctcggctgagcgcggctcccggctcaggcccctctgccgccgcagccgcgggcccagtagacacaacccagccgaggagcagcagcagcagcagcggcgccccgcgctccctggggccctccagaaagtttttttatggatatcagcaatctaattctacaatttatatggagagacaaaagactcagaataaccaacacaatattgaaggagtagaacatagttggaggactgacaatatccaagttttaagacttaccgtgaagctacagtaaccaagatgttgcggtattggtaaaagaaaagagaaataggtcaatggaacagaatattaaaagcccaaaaaatagatccaaataaatataggcaacttatatttgataaaggtgcaaaggcaatacgatggtcccaaataaaaaatataatgtatttggagatcagaatcaaggccagagtaaccgagtgtagcaagggaaggagatcagctacagaagagattagagaagtcaacagggtttagcgatgcaacatcccttaggctatgaaaagagatcaatgtttgtagcaggattttattttgagacactgactgaggtttctctcattctcctaccacctcacacagtcaggtaccttcaccatcctcaggaaaaaaaaaaaaatatatatatatatatatgtgtgtgtgtgtgtgtgtgtgtgtgtgtgtgtgtgtatatgtatatatgtgtgtgtgtgtgtgtgtgtgtgtgtatatatatatatatataatatatatatatatatacatatcttatatgcacagccctctaggagaagaggttgttcaaggagcacagatattagaatttttgcctttgagttccaaaacacagcctttaaagtcgtggtagaaataacgatcttgaaagacaacattctttaacagccagactttctgagacaggaaataataatggctccatatatttagcattcattgtgtgccaggcacagctctgagtcccttatattgagacctcaggaaaaccctgatataggtaatgctgttgtctccattatatggttgagggaaccgaggcacagagagaggaattaacttgctcaagtcacgcagcagagccaggacttgagcccaagcagtctggctccagatcctatgcctctgaaagtaagggaagagagtcacagagagaacgcactgggagggggagaaacaggggtgggaagttggtggaaaaaggaactaaaaatttctgagagcctgccagggtggaagctgcacccctttccctttgttctgagctgaggactccagtcttgggaggacattcccaggacagatgaagggatctgcccctatggttgtttctcgctgaatcagagtctcagtcttgctccttaaacccattcttaatcctgttccctctcctgctcaaacacctcccagggctccctactgcccacaggataaagtttttacttgggctctgggagaacccactaagggcctagatgccctgtgctcagccagagaggccgtcagggttttgggttcagagacgtcaccctgcctccacccactcacctccctttcttagatcccaccagtccccaggagccccatgctggctgtcaacgaggctcaagcagaggtgtcagcatagttttgtttctgggactctacagaggtgggtgggtgggtaggacagtcactgtgagttcgcacccaggggctccacccgcagccaaagtccaccctctgcgcgcaatatcagctcgggtttcctgcggggttcagtgtgggtcggcaggatgcggaagtgcagcagggtgagcgccaggaccaccttcatctcagccatggcgaacgcctgcccgatgcagtttctgggggcaaaagtgagggaatctgactgtgcccatgacccccatcccggccccatcatgcttagaacctggcctgggaccccaaacgcacccacataggcttgaggggcagaaagaggggataagtgtccacaggactcccatgtgtgcttgcatatcccccaaacctggcccaggctcctacccccagttcagataaacagatgaaggaggggactctgagcacaccgcagacccctctaggaccttcccaaacccattctgtgaacagttgcccatgaactcctgaggaagggagggaaggagagctggaactgggaccatctgtaacttccccctttttggacccctgcacccatcatgccatctctgcctcagacacaggccatccttacctgggccctgccgagaagggaataaaagccagaggtgacctctccttgatgttctcttggtcgaaacggaaggggtcgtagacctgcaggtgagaccaagaaggcttgctgggtggggtcacccagttgggtggggtctcccagttgtctccaagacccccggccttggagagacattttggcagatgtgtctccattgaggagaggtgatgttggattttcctggtcaaaaccctgtcacctcctctaggaaccttggaatggactccaaaaagggtggggtgagggaggcactacctcagggtctggccacacagttgggttgtaatggatcccgataatattgatgaggcagacaatgcctgtgggagagaagagggcagtcaggacaaggcccccctgcctgagggacccctcttgctacccaggaggctcctccccctgaggctgtgagcacctttggggatgacgcggccgtctgggagcacaaagtcctgcgtgcaacatcgggagatgaccgggactgggggatgcaaccgcaggctctccttaatgcacatggtcaggaagggcagctgggccaggtcgtccctaagaaaacaccccagccccaatcattatcaagggaacaaagacacaattctccagcttctctgtttccaagcgagactttttctccctatcacaaaataaattccacatggatgaaatactggagaatttaaaaagcagaaaaaaattagaaaagcagaaaattagaaaagtaccagaaaaaaatggtgccgattttttaaagattattctgaggaaaacacaacactctgaagccagctattaaaaaggttaacatattggcctaaaggtaaatatcctttatggtaagaaagcaaacacaaaatgcaagtgaataagaaacaaaatacccagatccactgttttgctcttattcatcattgtattagcgatagtagcaaatgcaattagacaagggaataaaaaagagaggaatgcaatttgaaatgtggtggtggcagacggtgattttatacttagaaaaacagaacacttcactggaaaacatttataaacatttaagacccagtaagggagctgaattgtttgcttaatctttcttctttttctgtggctgtttaaaattttaatacattgtacacttaagtggctctaaatttaaaaactataaaacatcctctacccctatggcccaaagtcacctgcttcttctcctcacaggttgcctaagttattattatttttatgtatctttctagagataatttttagtatcttaaaaatatgagtacatcatatactatacacatattccatatcttttctcatttaacagtatgtcagtcttttcttgtgtagctcctgggacttgtatcaaaatagggttatccctactctgaagctataaaataattttcccatggtttcttctagagcttttaacagcctttaaaaaaaactatatacttgagtaatctaaacattgtcctattataagacatggcaaccagattgagttgattttttttccaggaaaataagaagcatctggaaaaagataaaagataagatattaataataatgataataatataaaatatctgaattaaattttaacaagagacgtaaagtctctgtatttccaatgaatttatacatttccctctatctgaataaaagatacatttcaccatagcaacaaaatatctaaggattgatttaacaaaacatgcatatgatatctaggcaaatattttaagctctattaaaagcttaaatattatttgaatacattaataaccattttactatgacaaactatgtgtcaatattatgatgttacctgttttcacacatatcaatcacatattcaagtcaaacaagagaatatattcagtgcaaatgataatctatctaatttttaggaacttgatgaacttactctaaacttttttgggaagaaaaacatcataaagagctaggtcaatctgaaaataaaatattagagaaaagcaagtcggcttaggcaaagaatgcatgactaagacctcaaaagcaaatgcaacaaaaacaaaaataaagaaatcggtcctaattaaactaaaaagcttctgcacaaccaaagaaacaatcagcagagtaaacaggcaacccacatagtggaagaaaatatttgcaaattatgcatctgacaagggactagtatcaagaatctacaaggaactcaaacaaatcagcaagcaaaaaatcaaataaccccatcaaaaagtaggcaaagacatgaataggcatttctcaaaagaaaatgtacaaacggtgaacaaacatatttaaaaatgctcatcactaatcatcagggaaatacaaattaaaaccacagtgagataccccctacttctgcaagaataaccataactaaaaagtcaaaaaacaatagattttggtgtggatatggtgaaaagggaacacttttacattgctgctgcaaatgtaaattagtacaacctctgtggaaagcagtaaggagattccttagagaactaaacgtagatctactattccatccaacaatctcactactaggtatctacccaaaggaaaagaagtcgttatatgaaaaagacacatgcacacgcatgcttatagtagcacaattcacaattgcagggatatggaaccaatctaagtgcccactgacaaatgagtggataaagaaaatgtgacatatatacaccatagaatactactcagccattaaaaggaatgaaataatgtcttttgcaacaacttggatggagctgggaccattattctaagtgaagtaactcaagaataaaaaaccaaatatcatatagtctcacttataagtggaagctatgctatgaggatgcaaaaatatacagagtgatataatggactttggggactcagggagggacgttgggagggaggcaagggataaaaggttacatattgagtacagtgtacactgtttaggagacaggtgcactcatccatgtaaccaaaaaccacctgtaccccacccccaaattactgaaataaaaacagaagagaaagtcattctaccagacattaagacctattactgagttacagtaacaaatgtagcatggcaaagctgcaagaacagaaaaacagaccaaagaatggaatagggagctcagagacagatatgtgaataagtgaaaacccacatctggtaaaggaagccccacaaaaccctgggaaatggatggatagtacagctacaaaagaaaatgtggacaaaattggcttcatataaactaaccaaaagtgtccccaagaagtcaaaaggcaacaaaagacagaaaaaaagatttattttaacacatagtctcataagtaaatatgggaaaataacccaaaggaaaacagcaatgtaagatgatctcttccacaaaaagaaaaaaaatggcaagagatgttctatcccactcttatttaaggaaacgttcactaaaagaagaaatatgcagactgacaaaaatttagtgtggtgagtcctcaaagatctaggggcagaaataccatttgacccagaaatcccattactgggtatagatccaaatgaatataaatcattctgttataaagatatatgcatgcatatgttcattgcagcactattcagaatagtgaagacaaggaatcaacccaaatgcccatcagtgataatccagacaaagaaaatgtggttcatatacaccatggaatactatgcagccataaaaatgaacaagatcatgtcctttgcaggaacatggatggagctggaagccgttattctcagcaaactaatgcaggaacagaaaaccaaacaccacatgtcctcacttacaagtgggagccgaacaagggaaactcatggacacatggtggggaacaacacactctggggcctgtcacagggaggggttggggaggtgagagcatcgggaagaatagctaatggatgctgggcttaataccaaggcgatgggttgataggtgcagcaaaccactatggcacacgtttacctatgtaaccaacctgcatagcctgaaacttaaaataaaagttgaaaaaaataataataataatgtaatactcttggcgaagttatgggaaagctgttgccatcaaactcagctaataggaatagattttttattattattaaaattgtggagtaaaatggccttttattctgcaattgcacttttgggaatttgtcctgcagagatattcacacaaataagcaatggtcactgtacacacatgctgactgcaacaggtttaatttagcaaaagtctgaaacaagctaaatatacattgatggaaagaggtttagataaacatccacacaacagaatgctagtaccatagaatacaatgcaactacaaaaaaggaggaaacaggtcactagctgtgtcacacaatgcaggctggaaggtaaatcagtacagagattctggaaggcaaattggccatatctacaataactggaaagatacacaagtgctttcaacaaaggtgtgaaacaaataaaatatggaatgttatgccatgctaaaaaaaaaaaaaacagctgtaagacacactgtcgagtggcaaaaataagccacaaaatgcatacatgtaaatagcaaagggcaaaatacatagtatatatatatatgaaatacatatttctatgtatatggaaatatacacatttcattgactcctaattattaaattaaataaacatattaataacattataatttaataattaggaatatatatagtatatatggaaatatatatttctatgtatatgaaatatatacatttcattgactcctaattattaaattaaataaatatgttaataaatttaatatatattaaaatatataaatatgtatatatttcattgactcctatttatataaataaaatacatagtatatatatggaaatagatgatatagatagatcgatggatggatagatagatagatagatagacaagaaggatgaatagataggataaaggatggatggacggatggatggatggatggatggatggatggatggatggatgaacggatggacagatgtatagatagatagatagatagatagatagatagatagatagatagatagatagacagatagataagcagacagttagatgacaaattgatgtctcaagagacccctttagggaaagcgaggatattaggtggggtggtgggaatgtcaaggttaaaccctgtcttatctgtagtgtcgcattgagtccaagaagaatctgttctcatcattgcttttggaagtcaacactcattttccatgtataaatgcaaaatagaatggtactcagtctttaaaatgaaaagaatcctgtcgttggtgacaatatggatgattctggaggacattatgctaagtgaaataagccaggcacaagaagacaaatagcaaatgatctcaattacctgtgagagctaaaataggttacatagaaatcacagagacagaagaaaatggtggttgccagaggagggaggaagaaagaacaggaagatgttggtcaaagggtacaagtttccattagacgggaggaaaaagttttgagatctattatatgcatggtgactacagttaataataatagattatgttttccaaaacggctaaaagagaaaatttcaaatgttctcactgctaaaataataagtatatgaggtaatggatatgaccatcaggtggatttaatcattctgcattgtgtacatcataacatcacagtgtaccccataaatatatataatcaaaatttgtcaattaaaaataaagacaaattaaaaaacaaactcattttctaaaactcatattttgagaaaaacagaagatggtaaagatacattgttagtgggcagacctgtgtctattttatgtactcctactcacacagaaaaagagagcatgtgttcatatacagtgggcatcaggatagccattttctaggacacacagaaaaccattgatgatggaaactgccagagtgaggagtgtgaggcttaagaaggaagctcattttttatcaaaatttttggacacttttttaaacaatgtgtaattttgcttgaaatcttggttttaaaagcataaaaatgtttctccaccttacaggaccctgtgctgagcaaaggcttggatgtaagggcactaccttcaaaaggcctgtccagctcaatgtctcctctccatccccagctcctggcctggctcagacctcagaatgtccttccctgggacttccttctacaactggtcctctccagtatgccctctacactagccctaaaaagattctcctgctacctgtctcttcccattgcccttgagttaaaattgaagttcttgacttttttttccatgtattccacacccaggctctgctgccatctccaggttcatcatctcatcatgactcagtttctccctctctattcatctctctgtttctgtcttccctctctctttctttctctcttgctttccttctctctccattctctttttatgaccttctccctccccctgcacacaagccacttctctctttccctcttttctttctcttctctctctctgtttctctcactcttggtctctctctctctctctttctgtctctctctctctctctctctctctctctctctctctctctctctctctccctctctctctcactccctctctcctccctcgacctttgcctaggctctcttcttgacctagagccctactgcatccaaatatctactgatcattattaaggatctcaactgagacacctcacttttattttcatctattcatgtcttttagagaaaaattctcactatgttgtccaggctcatcttgaagtactggcctcaagtgatcctcccacctcagcctcctgagtggctgggattacaggtgccagccactgtggccgggtgagacactttctgtacctccagtcatgcttctcttgttctcagcctcatccctgcccatgtgggctgggagtttcctgtcctgggactgttcccccaccaggctgggagcacctggaaaacagatcgcagggctggattcttccaagctctccagagcaccgaaaggtgctagatacaaaactggggataggaatacagtgtaggagcatttgctgaatgaagactggatggatgaacaatgcaggtgttctggataggaatgaatgacttttaccctcaggtctctcttataaatccctggactgtacaacaggattgaaattagggtaaggaagagcaaacattcagaaagtgaagatgtttgaaaaaacatgataattcagtgaaaagaggaggtggaggagaaattcatttgctgaacacatgctaagtggcatcatctgccttcacatgctgtcacaaattctcccagcagcccaggtcccaaaagcctgcaaaccatcccctgctggcctggctgtgtattaagccctgcctctgagatttgcaccgattcccactaagcgataatggaagaattgaccaaaaaaactccctccctctgcccacctgaggagcagaaccaatgacaaaagatcaggaacaggccagcacctgcactcaccattcaatctctataggttcacggtccttcagaagctcttgcacttcttgccggcactgttcctggtattctgggtgctttgcaaggtggtataggacccaggagagaccactggctgtagtgtcatggcctgaggggcagccaagcaaaactgggtttctgggctgcttcagcaccagagggaggagagcacccaaactctgaggccctcaggagaatgtagggaggaggaggatgggcagaattaagtgatccagggtccacccactacgttcctgggatggagaggcccctgtccccaccgtagtcccacactgagaccctcaccctcaaacatgaaggtgtcagcttctgctcttatgtcctcatcagacaattccttcccatcttcatcctggagagaaggcaagacaatatccctgccccaaatcacaccagctctgaaggctcttgagtcaaacctaagataatttctgaagatccatcctccttccagaaacccaagcccatcatgcactcctagatgtctcttggtcaccaccatcagagcccaccacccacaggcttcccgctggcttcttcacctcctatttggccctgctgggaagagtcaatgacctatggatattttcttgtttcgaataatgaggacttttggagtaaagcattaactggcaacctgggttacagcatatttcaatggcaatttcacttggaggttagaaattaagtattggctgggcgtaatggctcacgcctataatcccaacactttggaaggccgaggcaggtgggtcacctgaggtcgggagttcgcaaccagcctgaccaacatggagaaaccccgtccctactaaaaaaaaaattagcctggcatggtgttgcatgcctgtaatcccagctcttcaggaggctgaggcaggagaatcacttgaacccgggaggcagaggttgcagtgagccaagatcacaccattgcactccagcctaggcaacaagagtgaaactctgtctcaaaaaaaatgaaagaaagaaagaactgaagtattactctgaatgtatttgctcacattctagagtggtaaactcagagaatacttcttatctttccagaaggcatctgggttataaacctataaacctacaggcatgtcgatctcactggaaaggagtagtttttattccagaacaaagcaaacatcctctctctctctctctctctctctctctctctctctctctctttctcattcccactctcgccctggaaggaagaaggggcagatgtgctagctagctatcctatataagccccaagatgtatactgtggggcccctctctgcagtgcattctggtgtatttacaggtaaaaacattgcattaccctagaaggaatatgggaatagagagccagctctacaatcctactctggttgctgctattgctgtgaatgatgaataggctgctgtgatccagggatttggtgcatctgtcatcatagatatagacatagatagatatgcataaaaatatgtcagcctaacttgctaacatgtaagtagagtaaaatctcaggctcctcactatttcaaacttagcagtcccctgccagctgaattccacagagtcatctctcaaacctatctctgacctgtctttttcaagcatgttccatggctcccagtgccctttggatcaagtccaagttctttcatttgacagaggcataaatctccactctattacttgaattcacatcccagagaagcctaccttgctcagcagaagcacatcaatgaagtctaaagtcttggactttgccttgttcttgaggaaatcatcaataccctgagtggggagggtgcagcgccgctcctggatgacggcatctgtgaagtcgtgcaccaggtggcaggccctgcggaagcgctgcccatcaggagtgagataatacaggaagtccgtgtgcaagagaatctgctggtttctcttttctacaaaggcactgagctccaagatggcggcaatatattcactgggcttcctgcatgaaggaggtaacaacttaacatatgcaaagtcccaggagcacctctcaccagcagctagaagctactgcccatcaggaaattgagtatccagaaacagccaggagacttgactctccaaactctcttctctgaggcattccatctctgagagctgcctccatgcaccaaggtacccagagcatagcttggacaccatgcttctctcccgtctctcccacccagtatccagcctgcactcttttccttccaaaaactgttcacaaaactcagacctcactgtcttccagctctttctgacccagcccccaccataacagacttgcattcaatgtctgctccatgtagcgtctacatgacaggcagacctccacagagctcagctgtgaccacatctgtcatcggcccaaccctcttcaaaagattcctgggaacctcctgataaagttcatgccacttttcctgattttcaatgtcctgaaatctatcccctgtctacttccacaacctcatgtctactgtctctttccccctccccatccttcaaagcccagctatgacacacagaaagtgccttcagaaaggcacttctggttaccccggtcagccatccttttccagcctactcccttgggttccaggcccaagttctcaggtcctaggaaaggactcactcctgacaattgctttcaaagctgaagacacatttctgcagactgtccaaggtcatgaggctgatgtgttcaaacatgtccagtctggcgctgccctctgaggccaggcgctgccacttgtcctggccagagaaaaaacagagccaaagctgggaactgcctcctgggagcaccttcccagacccaaacatcaagatggactccctgcaatcatcctcctggtcctctgccccaggtacccatccccaggaaggaccagccttggataggagcagaaactgttactattaggagataaagactcatggctgggagtcgagagatctgggttcaagtcccagttcagcctcctatggtctgtgtgctcttggtcaacctcctgcactcccataggtcccatctatcaaatcttcagtaacagttaggacaacatgctttggggccagataaaccaggacagaatcactgctccaccactcgtagctcacttactatctggttgaactttggcaaactccctaatctctctggacctcagtttcatagtctgcaacagggcaaaaccaaccaaagcctcatggggttattaaaattaaattcctaaatatgtatcatggagttggcaaatggtactgtttctgggatatggtgagtgctcagtaaatgttggttttactcatctccattgctataaattcatttcaaaaatatccctattacttgggaggggaacattacacactgggtcctgtcaggggtttggggacaaggggaaggaaagcataaggacaaatacctagtgcatgtggggcttaaaacctggatgacgggttggtgggtgcagcaaaccaccatggcacatttatacctacgtaacaaacctgcacgttctgcacatgtatcccagaacttaaagcaaatgtgtgtgtgtatatatatatacacacacatatatatatacatatatgtacacacacacacacacacacacacacacaccctgtagttgtttgggccgtttctcagaattgtgtttgcagagaacaacattgagagataaggcaatgactgctcctggacacatatcaggcttgcttctgcttgctaaaaaagcacattcccggccgggtgcagtggctcatgcctgtaattccaacactttgggaggccaaggcaggtggatcgtgaggtcaggagatcgagacaatcctggctaacatggtgaaaccccgtctctactaaaaatacaaaaaattagacgggcatggtgatgggcgcctatagtcccagctactcaggaggctgatgcaggacaatggcgtgaacccgggaggtggagcttgcagtgagcagagatcatgccactgcactccagcctgagtgacagagtgagactccagaaaaaaaaaaaaaagaaagcagattccctaagcctagtgctcctttccttccatgcaccgtactgcataagcaggcaactattcaaacctctctatggcaccccgtgggatttaagtggtttggagaaattatgcaaaccaagaacatgctgcttgctatgccgtgagtaataaattgctgtttgtctctgacccaggactctcgtatctccttgcagaatccatgaagtattaacaaaactagcttatcagcttgcaattaagaaaaacatcctaagcacttcacaaaatcccaactcccaattcttcacttctccctttgcactgtgatttccagcaacttctattaagagatggagactgttttatgaccctttgagtctgtgctaacctaagcctggttgaactttgaaacattgcagagaaaatgtccagagacattgcagtctcctggcagtctctcagaacccagtctgtgccatgtgaacagcagggtgcctccgggaggcagagaaacacatggagaaaagtccaggtgtcacagctgaggccatcccaggtcagcctaaagctagcaaagccccaaacaaacatgtgaataaactgagccaggatcagcaaagctgcccacatgacccacagctgttcatgtaccaagagtgatcccatccacatgcagaagaaccagccaactgtctcacacacttgttaagtataataaacccttattgctctaaaccaatgagttttcaggcggtttgtactcagcaattgctactatgcaatcttgatctttactctcttgagtttgaaggatttctgtgagagaagcatggaaactcacaccttttgagacatactatgtgctggggacatgaatccattaccaccttttaagtagagattgttattcccattttacagatagggaaaccaaggctcagagaggaagagcattgtccccaaagcacaaccaaaattccagagcagatatgcctgtggtccctctaccccaaggctccagctgggacccagagttcaagggactcacgtgcatgatgttcacactcttgttgaaaatcttcatataaggcttcaagatgttgaaatggaaggcaggcgtcaacatccgacggtggcggctccacttgtcaccaccactcagcaggagcccatcccctggcagggcaaccaaggacagtggtcaagggcagcaccctcccttatccctaaaggatatccccaaccccattcacctcaattactcacccagccagggcttcaggaagccatagaaaatcatatccttgggtgcgacagcagctgacatgattgaggaccatcagtggccatggagaggggtgagagaaggactttgggtatggaggaatgctcccagccaggggtgtgcacttccacgcatcccacccagcatagcaggaagaaggccaagggtagaggaagaagggaggatggtggaggaaggagagaccagaccaggctgcagcgacagagtagagcaataacacagcatgccccagcacacagtgacatatctcctacaaggtccaacatgttctgcaacacctgagcatagctcaacactctacagaatgcctttacagggacctaggacactctgtctactcccagcactctctgctatcttctgacatggatctgggacctggaatattgccccgacagttgttaacattccctgacatggccaaaacacatatgacaaaccctaaatgacacaacatgctctgccatggacctgagatggtctgatatgacttctgtgtatcccagtgaagggtcctagataacatttaaatatgatgtcactaatgtcctaaacatggcccgggtataaccaagcctattcttcggcataattcaaatctaccctaagacctaactatactaagactcaaataatatctcagacagttctcaaagattccctgggtcctacaccttggacaagcaccaaacatggccaagacatttgaagtagaataaaaagacaatctcacactacatctcagacaagaaccaaaaagactctgacatgccccaaatgtcctcagccacaactgagccccacacatgatgacttctgtatatgatcccaggtggaagcatataccagatacaatcaaatataatgtagaaaacataggctatatatgggacccttggaagaaaggtgggctttctgattggaactgggcttctgagactcatcgttgacaccatatgaaaaggcaaagtgacacagagaatggtaaaatcgagagaaggagacagattcccagtgatgtggattaattgacacctggatccaaccatgcctgaagaccactctccccagacttacagcacattgattctctttatttgcttagaccacatgagtctgagtttccatcactcgcaactgaaagagacttcagcagccagagagagctgaggacctgcccagagtcactcagcatcctgaggttatagccatagtttctgtgggatgcttcccctgcccctgcttagtctggcctgttcaagcacaggatgagcagaggtaaagaaagggccccagactggggtgggatctcctactggagattgctggggcctggagcaggagagccatgaatagggtggatgagtgacaggatgaggtaaaaggaataaactcaccagacttgaacatcacataaatagcagcccagattctccaccagcctcaaatccccctagtaccataggcttagggacagacaaggctgatgccaggcctggcagcggtacctgtatactaatgatgtccactgcatcacccttccccttgctttaaaatctttttactcatttttccagcaactcctcctccaggaagccttccaatctgcccccaggaaagaccttgttctcccagttgtcacacccatctccttcttgccaattcctgactccacgaagtttgagatgtctctgtccagatccatttcctcaagcacggggctttctcgaggacagggccctaaattgaggctttttggagccccagtggtgcccagaacacaaaggcagagagagatggcagtggagggaggagacgctgacatggggggttcgtgaatacatgaaggaaagaggaacatggctgagagagaagcaggaagaggggcctgggccctgcaggggccacacagaagcttggggaggggagaggctagaaggcctttgatgtttcccagcccccactaccacaagctctgcacgggtacctgaggcactggtgataggccggataatgtcagggtggcataaaatgaggagggggaaggtaggacccagccacaacttaaagccctggggatatgtggtcaccagctgggtcaatgtcttcatgccctcttccgtgggagtgacctgaaaacaaggcagaggccgtcagcccttgtgatggttaattctaggcatcctgaattaatcatgaattccacgtgaccgagccaagagatgcccagataaaacatgctggtaaaacattatttctggatgtgtccatcggtgtatttccagaagagattcacatttgaataggtaaactgaggaaggatgatccacctccccagtgggggtgggtgtcatccaatcctttgatggtgcagatacaacaaagaggcagaggaaagggtggatgtgctcatccatctgctcctgtccttggacatgagaactccaggttctcaggccttttgggactcagactgaatttacaactccagtgtccctggtttctggcttgcagatgctatatcatgggacttcttgtcctccatcatcacattttccaatttccgtaataaactctctctctcacgctctctctctctctctctgtctcatacatgcatgagatataagcgggaagatatcctgtcaattcagtttctaaagagaaccctgagtaatgcacctccccaccaggagccacatcaagttccccctgcagcctccagatgtggtgcagcctctgccctgagcatcgtgtctggattctgaacagctgcagagaatctcagctgacccctgctccttctctcttggggctgtctccaagatccaaagataatggccgggcgtggtggctcatgcctgtaatcccagcactttgggaggccatggtgggtggatcacctgaggtcaggtgttcgggaccagcctgaccaacacagcgaaatccccgtgtctactaaaaatacaaaaattagccaggcatggtggctcacacctgtagtcccaggtactcaggaggctgaggcaggagaatcacttgaacctgggaggcggaggttgcagtgagctgagatcgcaccactgcactctagcctgggcaacagagtgagactctgtctcaaaaataaataaataaataaaagatccaagagtaaataccaaagcagagggagaaggcaagctgtctgctcaagaggatgtgttttctcgtcttggaaatggtttcaacctggggatggccacatggaaaagtccgcatggaaggaggtctgtggacagcagtgtggcctcaggacatgtccctgaggctggttcctacatccctttcacgtcctggctggtccccaccagcggctgttcctcccacactggggacattccattctcagcagcccccaggcgtagaggagtgactcttaactgtctacagtaagcacctcctgcaggccaggctctgtgctagtgtgtcctattcaccctccactgcaccgatggacacgcccatcaattttgccatttacaagtgagcagaccaaggccatgtcccccaaatgggagagcaggtctaagtcggaggccaaggtctgcggagtcaaggacagcttctgaaaagagaagggagtggccaacttttattcaggcaggtaacaaggccgactgggacatgttagtgaggaagagcaagataggaggaaggtgcctccagaaaaggaggcagcgggagactgcccacacttctcttctggaccctctgtgtccctgcgtatggaaaggggctcagagctaattcctgtgagaaagcagcagcacagagatgggcagacacaagcaaatgggccaggcagggagtagtccctggacagtagactcaggaggcctcaagtccagcagtggagaaggtgcaaatgccaggagatctttgctctgtgcacccataccactcccacaggagaccctcagaggtgcagtaacacagggaagacaggcaggaaaaagatccaagcaggctggagtgggaggacagggaggtgagaaagacttgggatggcacatcagaggaatgagtgagcggggagaggaatgagtgagcgaggagaggaatgagtgagcgaggagaggaatgagtgagtgaggagaggaatgagtgagcgaggagaggaatgagtgagcgaggagaggaatgagtgagcgaggagaggaatgagtgagcgaggagaggaatgagtgagcgaggagaggaatgagtgagcgaggagaggaatgagtgagtgaggagaggaatgagtgagtgaggagaggaatgagtgagtgaggagaggaatgagtgagtgaggagaggaatgagtgagtgaggagaggaatgagtgagtgaggagaggaatgagtgagtgaggagaggaatgagtgagtgaggagaggaatgagtgagtgaggagaggaatgagtgagtgaggagaggaatgagtgagtgaggagaggaatgagtgagtgaggagaggaatgagtgagtgaggagaggaatgagtgagtgaggagaggaatgagtgagtgaggagaagaatgagtgagtgaggagaggaatgagtgagtgaggagaagaatgagtgagtgaggagaggaatgagtgagtgaggagaagaatgagtgagtgaggagaggaatgagtgagtgaggagaagaatgagtgagtgaggagaggaatgagtgagtgaggagaggaatgagtgagcgaggagaggaatgagtgagcgaggagaggaatgagtgagcggggagaggaatgagtgagtggggagaggaatgagtgagtgaggagaggaatgagtgagcgaggagaggaatgagtgagcgaggagaggaatgagtgagcgaggagaggaatgagtgagcggggagaggaatgagtgagcggggagaggaatgagtgagtgaggagaggaatgagtgagcgaggagaggaatgagtgagcggggagaggaatgagtgagcggggagaggaatgagtgagtgaggagaggaatgagtgagtgaggagaggaatgagtgagtgaggagaagaatgagtgagtgaggagaagaatgagtgagtgaggagaggaatgagtgagtgaggagaggaatgagtgagtgaggagaggaatgagtgagtgaggagaggaatgagtgagtgaggagaggaatgagtgagtgaggagaggaatgagtgagtgaggagaggaatgagtgagtgaggagaggaatgagtgagtgaggagaggaatgagtgagtgaggagaggaatgagtgagtgaggagaggaatgagtgagtgaggagaggaatgagtgagtgaggagaggaatgagtgagtgaggagaggaatgagtgagtgaggagaggaatgagtgagtgaggagaggaatgagtgagtgaggagaggaatgagtgagtgaggagaggaatgagtgagtgaggagaggaatgagtgagtgaggagaagaatgagtgagtgaggagaggaatgagtgagtgaggagaggaatgagtgagtgaggagaggaatgagtgagtgaggagaggaatgagtgagtgaggagaggaatgagtgagtgaggagaggaatgagtgagtgaggagaagaatgagtgagtgaggagaggaatgagtgagcgaggagaggaatgagtgagcggggagaggaatgagtgagtggggagaggaatgagtgagtgaggagaggaatgagtgagtgaggagaggaatgagtgagtgaggagaggaatgagtgagcggggagaggaatgagtgagcgaggagaggaatgagtgagtgaggagaggaatgagtgagtgaggagaggaatgagtgagtgaggagaagaatgagtgagtgaggagaagaatgagtgagtgaggagaggaatgagtgagtgaggagaggaatgagtgagtgaggagaggaatgagtgagtgaggagaagaatgagtgagtgaggagaggaatgagtgagtgaggagaagaatgagtgagtgaggagaggaatgagtgagtgaggagaagaatgagtgagtgaggagaggaatgagtgagtgaggagaagaatgagtgagtgaggagaggaatgagtgagtgaggagaagaatgagtgagtgaggagaagaatgagtgagtgaggagaggaatgagtgagtgaggagaagaatgagtgagtgaggagaggaatgagtgagtgaggagaagaatgagtgagtgaggagaagaatgagtgagtgaggagaggaatgagtgagtgaggagaagaatgagtgagtgaggagaggaatgagtgagtgagcagaggaatgagtgagtgaggagaagaatgagtgagtgaggagaagaatgagtgagtgaggagaggaatgagtgagtgagcagaggaatgagtgagcgagaagaggaatgagtgagtgggcagaggaatgagtgagcggggagaggaatgagtgagcggggagaggaatgagtgagcggggagaggaatgagtgagcggggagaggaatgagtgagtgggcagaggaatgagtgagtgggcagaggaatgagtgagcggggagaggaatgagtgagtgggcagaggaatgagtgagctgcctccctctcttctctgtgttcccacaccccagccaccctcaaaacccagctccctgagccccattcctgcccctcaggaactccatgcatcctgagaccccagacccgtcctgctgacaaactcaccaggccctggtgtccccaaaaccagttctgtttcgggggttgaggaaaacactggaggcggcggcagttgtcatagaaggtgtaggtccaggccaggacgcgggccaggagccaggagcctccaaccagcagcagaagcagccacggggatgctgccacgggcccgaggcccagccaggacaggctcagctgcggcatcctgcagggcagacgggatggagggtgggatcctgaggcccagggaagggcccaggaagctccaaggacagtggaaaggggcaaggatgggcagtgctggaggcagatcagggaaggctctgagatgggtaaacaagagctgagatctaaagtccagaaatgcccaatgaaaaccagcagccaagtggcctccagttacacagaaagggaaagagagagagaggctgattagaatccaaaaaggcccagcctgaatcactgggaggttgccaggggtccagttaccaggaaatcaccagtctcccaggccagcagccttgacccaccccaaccttgggcagtcccctccccatcccaggccaggaccctccagccctgccactgccagcctggctcctatcagaagcagcttgtcccacataccctcctctccccctctgctaggaggtctttgcctctggcccctgatttccggaaggctgtgggaggcgaggctgggctgggctggtcgagccaatccccatggactgggtgtgtcttccaagcctgggcaaccaaccaaaacctggcgtagggccagctgggtgcagaggagccagctcagggtgacacagcatgggcacaggatccgcaggtctcaacatctcacacctgagtgggaggggatcttgaggaagagtcaaaggtgactctgagccccaaagtttacagccaccttgcccttccaaggcaagagtgtggcagataaagtcatgaacttgagagttcaggtggcaagagagtggggccaggccaaccattgtgccagatcatgttctgagctcctctccacatgtggtccaggagttcatcatgcaccatttctcagtgcagacttaggagattcagagacagaagctcctggcctctggcttcacagtctggcaggagttcaagtcctgcctccaggcaacccagggcctgggtcgagacatgactgacaggagtaggaacaaactatctaactgtgctggggattacccggtcagattttagagataaagagccccgctggaggagaatacctggaggctaggttcagcataggaggacagagaggggagatgggaggtaaggctgagaggggccatgagtggatggggccagggacaggagggcagagatgggggaccctgagtggagtccttattctgccctccccttgccctaactgtgggtagtgagcccctcctggactcaggcttcccatctgggaaatgggatgtcagataaggccttagagggggacagaggagggatcacaggaaaatgggccttagatggggacagatgaaagattctgaggagggagtgaagggaaggggctggcagctagcactttagctgctgtgtgtcagtctctgctctttgcaaaagacaatatgcaaagttcttttactgtgtactggactctaaataaagcacacctaccatgtgccaggtactctgtatacatgttgtgtactgtgtgccaagtgctctatgaaaagtgtgtccactgtgtgctgggcgctctacagaaaatcttgcttctttgttctcggtcctctatataaagtgaaatttgtgcggagtaacttatgtaaagtgtacctactctgcacctgctgctctatataaaacacacctactgtgtgtcagatgttctatgtagagcatgtttactacgtgcctggtgatctatgtcaagtgcacctactgtgtgtcaagtgctctacataaagcgtgcctactctgggtgctgggtactcttcataaactgtgactccatgtgtccggtactctacataaagcacacctactgtatgccagatgctctacataaagtgttctttctgtgtgtcaagtgctctacataaagcgtgcctactctggatgctgggtactcttcataaactctgactctgtgtggccggtactctacataatgcacacctactgtgtgccagatgctctatataaagtgttttttctgtgtgtcaagtgctccacataaagtaaaactactctatgtaaagttcttgacataaagaatgcctactgtgtgcaaggcactctccacaaagcactcctactatgtggcaggggctctaggtaaagcatgcctactgtgttccacctactctaggtcaagtgcacctgctcatgtcagatgctcacccgcgtcaccatgcccaaagccttcacaccaacctcccctcggttctctgagccagagccctgggattgttggagagacctgagtgatggcatccagagaagggaatgcatccatttaacaaaagagcaaactgagtctcagagagggcaggcctctagcccaagttacagagctcacaggaagccaggtttgtgagatcctcaagcccaaacctttttcctctgccatgctgttctgcacccattcattagggtcaatgccatattaatacagggacatgtataaatggaggaatctcaggcaatgtcatggtcccagaggggaaatatcttgaggtctttgaatcagcacctggctcctcctcccacaccccggatgctccacccagcagacccagggctcccctcctggccctccttgtatcctgtccagaattgccctgccgggtggacttgggtgagggggtgcttgaaggatggggctcctagcacagctgctaagcaggagggcagggaagacagtgctcctgacactggctgggtgttggggagccccaaagcctcccccaccccaccaccactgccagctcaatcaaccaggggattcaggctcctggccctacagcctcagtggggtagggtgcatcccccaaaatccctactccctctgcaaggacagacctcacctactggcagttccatccctgttaggctcagggagcaaagccagagtttgatgaacaggcggggttatagggacacagaagaaagcgctcccagtggctagaggggtttggcacactgtagaccacctgtgtgcctgggatgagcaggcagcctagagcaggaatggtggccaccaccatttgccgacataacctacacagcctgttttaagtcctttaagtatattagtcaccttgtttttcattttacaaatgaaacattaagcctggaagatacttaagtgaccacccacagttgcacagctggtggagccgggctatacacccagacctcccacccagcctcacattgtgctaccctcaccaccgggccgtgctccttcacgtctgtaaatgggcgtttcagcagcacccacctcacatggttgtcataatacttaaaaagacaatgcatgcaaaatgcacaaggcagactaaaggttcagcaagtgcaactcactgttcctgctgttgttgcagttgctgtgtaagctgcatatggggtttgacctggatcccacagggggcagagacatggccttgcactgtattagagaagggacctaaaggtccagcctgtcctcaccacgtgttctctttggctgtagattatggctaggggagcaacctcctagacacaggaggcttggcctgaatccagaagagttatctgtggtgaagtagtaacagaaaatttgaacacctgttaggtgttaaggcagactcacaggtggattcttgcaggggagatgccagctgttctggttctgggaactgaacaatccgtggagcccagcctcccatctagtgaagaagtgagctctacacagcccagctactgcatccatgagagtctctgcttgaatgtcccccaacatggagacctcagcacacacacacacacacacacacacacacacacacactctgcctttacagcagtggtccccaacccttttggcaccagggaccagtttcgtggaagacaatttttccacaagttgcagcagggggaggagaggcaaagatggtttcaggatgattcaggtgcatcacatttattgtgcactttatttctattattattacattgtaatatattatgaggtaattatacaactcaccgtcatgtagaatcagggagccctgtgcttgttttcctgcaactagatgatcccatgtggcggtgatgggagacagtgacagatcatcaggcattagattttcataaggtgcacacaatctagattccctgcatgtgcatttcacagtagggtttgcactcctttgagaatctaatgctgctactgatctgactgagcattactgagctcaggcagtaatgcgagtgatgtagagcgactctaaataccgaagaagttttgctcatttgcccaccgctcaccttctgctgtgtggtacagtccctaacaggccacagaccagtaccagtctgctgcctggaggttgggggtccctgctttacagaatattagagggtagatactctacggaaatgagcctcaaactcaaccagttctaaatcaatgagaaaggggatcatttaaaatgcatcttcctctatgtacacacatgtcaagggaggcaagatatgaggctaagggattgaggtacagaacagcaggtatgtctgcaagattttcacagaaattaggtgaacagtgcacacatgcatacacttctatctgtcatatttgtataaataaactctagcatgaataatttttaagcttagagtatagaagtttatgggccgagcacggtggctcatgcctgtaatcccagcactgtgagaggccgaggtgggtggatcacctgaggtcaggagtttgagaacagcctggccaacgtgatgaaaccctgtctctactaaaaatacaaaaattactaaaaatacaaaaagtatctaggcatggtggtgggcatctgcaatcccagctactcaggaggctgaggcaggagtaccacttgaaccctcttgaacatggaaacccaaaagaaatcttaaaaactgagttcccagctatgatgggaggggatgtcggctatgcctcagtatgtcccttccttattaatctttaaccagaattatctccagtcctatctcctttgagactggaatcttcccatcctttgcaggagctaaagcctccctgggcagagagcccttgtgtgctggaggaagaggtggaggctgcaggttcctgaacgccccctgaggctcctcctggcccctccagacccagaggacagcccttccagggtggtttcctggggaggcccatgggaatgacctgctgggaaggccactgcaggaataaagctcacagcaccagtttaaggaggcctttgtctggctcctacacttgcctacaggtaccccctgaaaacaccttaaaaggctgctttttctgcatttgccttatggccacttgattgaaggcagccccaggtggaggggaaccaagaggatatgggtacaagggcagagtcagagagttgtggatggagctgcccagccggcggttggggtgcagaactgaggagacagggaagagagagatctcaggcttaggtggctgcctggggtctgtttttcccacacagagcacctggctgttcagccagcccaggtacccattgcagcttataggtcaacggtcctcaagtgaatgtgattgtggcccccaggagacatgtggtcatgtccagagatactctggttgtcaggacttgtggggagggggtgattttcctactagcatttgagggattgaggtaaaggatgccgctaaatgtcagacaattcacaggacagctcccactatgaagaatgatccggtcccaaatgtcacgagtgctgagattgagaaaccctgttctaggtatattttgtctccactgttgtgtccttgctaacctggttgcaagaggtaggatggagctggatgcattccagtgctgtgagatgtttgctctgcacctgtgtgtgagccatccgcagtgataccagagtaggcagaattctgtccacctgtcagaggagatgggggactgcagcctcgagagctgtggctgctccagcaagcaggaggcaggatggtggaatgtaggggtgaagcaggagcttgaggagagggggaaggttggatcagactcttggttggatcagacactgtgttgtgtcattgccaggaatactaaggtccctgctagggttggagaccatgcatctagaatggggtcagtgagtgacatctggtacagaatgatacaaacaaaccagctcagaagaccaaaatcatcatcagtcaatgacaatgacttttacgaggtggactctcacagtgctctggttactcctgtttttcacttggggagaggagcctcagagctgcaaagtcctttctccaaagacacacagtgagagctggggtttccaccctgggtctgatgcctccacaacttgtaaacatttcagaaaattctctctggaagccagagtggagtgtgtgcagaggagaggagataaggaggaggatggggcagcagtccaggagagaggatggagaggagtggagcagatgaagtgcttaatagaagagaggttgcccagcaatgggagggatgggggaggaaggtggctgacgctggagtatggtttctgggtagggaggctgcatggtctgaagactttccttccatgtcataagcgtggtcttttcatgtgggatacgttgtccagtaaagttcctcattgtccaggtgattctgtgttctccaagcgccgggctgactcctcctgcatggtgggggttgggagggcagatacttgaggacaatgtcctattgagactactatggggtgtaataatggatgggtccatcgagaaccaaggatttcagaaactcttgtagcaatatggctcacattattcataaaaatatttttgttttcttttatggtagaattcaggtgcagaggattcagactgtgatatttcctgtttgaggcttttgattgacattggtttgtgcaagatccttttcttatttcatttgtttatcccctttctttcactgtttccattcttttctgacaggagttttcacatacttaatatgcactttttgatttgtatatgcttttgtaagatacacattgcattctatctgcacatattttttatgtgactattttaaaatggtaaattaatgggcttaattttattagagaagttttaagtttatagaaatattgatcagaaagtatagagagttctcacatacgcctcacccctgcatgtggggcctcacccctgcatgtggggtcatctctcctattcctgacatcttgcatttctgtagcacctgtgctacaatcgatgaaccaatatggacacattattaaccaagttctagagtcgtctttccttttgttgacatcttgcattcctgtggtatgcatgttccaactgatgaaccaatattgatgaattattgttaattaaattccatagtttatattaggttatactcttcgcattgtgtatatggattttgacaaatgacatggattcattattactgtatcattcagagtagtttcatgtacatatattttaatgtgaccacatggaattatgctagagagttcatcctgttttttgtttttttcactcaatattattttaaaggttgacttatattactatgtgtgcatctaactcctgccaaaagctctatatcctttttcctctatatccgttgtttgcctctatataattttacctgccttctctccaattaggaacaagcaggcttatccaacacctccactaaaataactgctgcagggaacattctcttacatgaccccctataaacaggtttcagaagtcaagatagatacacagtagcaaggttgctggtacacagagcatgaatcccattaaaaattttaatttctaccattctacctgcccactaatagtgcaaaagtatttcttttattattattatttgagacagagtctccctctgtcaccagcgggctggagtgctgtggtgtgacctctacttactgcagcctccacctcctgggttcaagaatttctcgtgcctcagcctcggagtagctgggattactggcacgcaccaccacacctggctaatttttgtatttttagtagaaacacggttttgccatgttggcgaggctggtctcaaactcctggcctcaagtgatccttctgcctcggcctcccaaagtgctgggattataggcgtgagccaccatgcccagcctagagtgtgtaagtatttctttctcctcatagaccaatcaaccctggacattttataattttgggaattgcaggggtatacagtgaaattccactactgttttttattttccccttccctccattctttccttcctttcttcttttcttcctttttgtttttctttttctttctttttttttagcattctttcatttgcctgagtaactcctatgcatcatcttctcacatcttttgctcatttttgcgttaaggtacctccttcttcttgatataaccggtttcttgtttgttctatgttattcccttgtcagtttttaagaaattccccacactacttggatgtgttcctgtcggttttagacaatgcaaatatcttttccccatttcccatctgcctgttaacttcatcctggaaaccctttgttgaatggaaatccttaatgctgatttttttcatgttttaaaaatcatcttaatgtttgtgcttttgaaattttgtttaggaagtctttcctcaagcctagctcacaaagttattctcctatactttcttctactaaatttatactttgacatttggtatttattttttgaatccagctggattcctcctttgtatgtgctgttaggcagaaaatcagatttactttgcttcataaaatgagcagttttttcactacaatgagtaaacaatctaccttttcctcttgacttgtgccagtacatttatcatgtactatattaggttttgaataatgcagggatattttttgagatttccaatcaacttattcagatctatgtctgttccatctttcataattttaaaaatgactatgacgctattgtgtgtctcagcatgtgggagagaacagctcttctcttgtttccatttttataatattagtatggttcgtgctaacatttatgtatgtatgtatttgagacagagtcttagtctgtcacccaggctggagtgcagtggtgccgtctccactgattgcaacctccacctcttggtttcaagtgattctcctgccttagcctcctgagtagctgggattacaggtgcccaacaccacgcctggctaatttttgtattttcggtagagacagggttttgtcttgttggccaggctggtctcaaactcttggcctcctcaacctcccaaagtgctggaattacaggtgtaagccaccacactggcctgacatttatttttctgaaggaattttcaaatagtttcattaaatgtatggttgattcactggaactgtaaacacaattgtattgaggttataatttgagtatgaattgacatcattcatacatcaagccataccacccaagactgtaaactgctccccgtatgttcagataatcttctacatgtttattagtatggatttaaaatttttctctttgaaggtatgggatgctttgggttaattcctagatatttcatagtagaatttttcaaagtatgatatgaggacctctgcagggtgatccctgaagtctttattttttctaattatatattagaatatattttcatcatatgcctcaactaagacatcatacaggctcccaccaccacacccggctaattttttgtattttttttttagtagagacgaggtttcaccatgttatccaggatggtcttgatctcctgacctcgtgatctgcccacctcagcctaggattacaggtgtgagccaccgcgcctggcacatattgccacagactgaataaagaaagaaatgtgagcatcaagctgtttcctgccaagccaggacatacgatgtttttgctaaaacgtcaaacaaggctactcttctcacggaatgttttttcttaatgtggttatttgcctgaaaatgttacttatatttgtaagagttaaagaaagaagaaagaaacacgaaacatggcttggcagttaaagacaggtttactttagataaaacctgaggggggcttctggccaatttcagtcaggagaagtttctcttacacactaagagtacatattagttttagggtgaggggcttatcacaagcttggaatgtttctgtgtgggggagaagttttatggcagggttggaatgtctctgggaggaggggaggttatcttggggctgacatctttccggccgggtgggagtgatcttgaggctggcatcttcccagccagaggaggcaaatttcggggccagcatgtctctcactggggaggagtttggaatatttctggctggagatgttatttatggtttatggttgtgctgaccttagccattagcctgacaccctttggatttaggcggttttttattaaggggaattttagaatgaggggcttgtccaagatagtgatgctcctgctctgtcaatattagcatgcaataggttcattattgctcttttaaatgtactaataactaatattttaaatgattttcaattttcatttccaatatggtaaaaaacaatgatagttctaagccacaataaacaaaagccctttagagtgctcagtaatttgggtgtgtaaaggaatcctgagacatgtttctttatatttttctttatattttgtgcatttgaaattttgcttaggaagtctttcctcgtgcctagattacaaagttattatcctacactttctcctattaaatgtaaagataatggcaaagagtgcaactacttttgcaccaacctaatagtttgtgttgctgttgggaatcttccccttctctgtattcaacttctatttcttgaatgcttgttactggtgtgacactaggaggatcactgggatttttgccagctgaccttgccttctgcatcactgggctctgttattgttccaatagattataccatcattcttttatcttttatatgtagatgatcacgtctcttcgcttccagtcctcagataccttagatactttgtttctttttcttgccttgtaacatcactcacgactttcagctccatgttaaagaacagcagagttagtgagtatccttggctttttcttgatcctaaaataatgcatcaaaaagtttcttcatttagtgtatgtagtatttgctaattttgtgctatatattctatatttagataagaaaatctccttgaattttgtgttgtgaagtgttctttaaaaatcataaataggagtagagtttaagaaaaacatatttatgcctttattgaaataatcatgatttttcttttttaatcaactcctgtgataaatcatatgataggttttctgatgttagccatccttgtcatttgtgaaataaatctataccactttattatggtaaaccatttttaatataccattaaatttgactaggttatggttttattctggaatttaaaatctgcatggataggtgaagtaggcctatagttgtctctttttcttttttttttctttctttttattttttgagacagaattttgctcttgttgcccaggctggagtgcaatggtgcaatctcagctcaccacaacctccacctcccgggttgaagtgattctcctgcttcagcctcccaagtagctaggattacaggcatgcaccaccacacctggctaattttgtattgttagtacagatggggtttctccatgtttttcaggctggtcacgaactcccgtgatccacccgcctcagcctcccaaagtgctgggattacaggcgtgagccaccacccctggccaatttgtctcttttttcagcaaatattcttacctgattttagactgagattgcattaacctgctgagatgtgctggtcagatttcctaacacttttctatgtttttgaagctcatgtataagatactaactgtttcttaacataataataattgctaaactttaataaaacccactggggcaaagattttagagaaagaccatctttgactaccatttcaatttatttaaagcttatttgagcatacaaggtccccatttttcttgaaccagttttagaattttatatttttctgagtatttggtcatttcatctacaaagtaaatttattattttttaaaacttattaatttaaacatatccattttctctgtaattatttaccatttttaatttggagttttgttattggcaccttctccttgtttccctctatcttctcaatcttttctcatgcgtgattttggctttattaagcatgaacttttcttgaggcagtttcttgataaatctatttagtgccatgtatttccctcaaagtactattttaggttaaaatgttgacattcaatatttgaataatcatttaattctaaagctttcttaatttttataatttactgttgaacctgaagattattcaattatatagttagcttccaagcatatgagatttgaaaagctatttcttctctattaatttttaatgttaatgcattatcatttaaataacatttatactttggaattaaagaattttttatatcttaatgaaatgtcagtttttgtaaaagtatccatgtgcttgaaaaaatatttattctctggtgaagagtctaatatataatagctaatatttattaattgcattgtaattattaattgcattgcaattaataattaataaattacatttctgaactctgttaaactttctaactataatatctatctgtcattgatttagttattattccaggattattatccttaatattccaggatatatagtaatgtagacattatatttatgctgattgctataatgttcttttaaatggtatgaatattattctctatcctttagcgtgtgtgatttcaaaattttagcatgcatcaagaaacaacatttttcttcacagccgaaataaccagattgcacttttaaaaaataattagttgggcatggtggctcatgcctgtaatcccagcactttgggaggatgacataggaagatcacttgaggccaggagttagagactagtttgggcaagaatgtgaggcccagtctctatggaaaaaatttttttttaattagacaggtgaggtggcacacaactgtagtcccagctatttaggaggctgaggcagaggattgcttgagcccaggagttccgggatgcagtgaatcacgatcctactctaacctgggggacagagcaagacctgtctctaaataattagtaattagatcaataataatgctttaatattactcatacctaatcattcattcatactataatcaaaatgttctccattgccttaaaaatacttacagctggttatggaaatgaagattcaactggtcccctatgttgcatccagttgctatgtccccgaatctctcttatcttttggatgagcctttatcaatgagaccagaccaattgttctgtggaattatccaccttctgaatttttctgaaagcttcctcacattgtcatttagcttattcctccatcttctgtacaatgattattctttttgactagtgggcatcttttcaatctagtacttgcagtcttttaatattatcccattacttagtgaaggtttcatttcacactggtacaagatatccaaggctttcttccatgtccagatcacagatttgccatgtctcaaggaactctggttccctgcagtggcatatggtattaaagacattgtgatcactgtttccttagattccaccttttattattattaagattgcaacctcagcttttatttggtgcatatttgtctgacatgtatgtatccagccatttcttttcaaattttctgttcaatttttttagaatagtaaatgcaccatttgaaattagatggcataaatgagtaccaataaaacagtattaaaataaatgtaaatgggttaaataagcaactaaaagacaaagactcccagggaaaaaagatttaaaccccaagatcaaaatacatgttttctagaactggcacattatcaagagaacctgaccctgatcatctatgctggtctctaatggctccaagtattgaaccttttctttatgttagtcagtgttaatagaaacccaattagtagccaaaatctgacttgatcatctaatatagtgatctcatttgatctttgtcacattgctgaatgttaagaactattattatttattccattttacagatgaggaaagtgagacccagaaaattctgctggttgttgaatagcatagagctgttgagttgccatttggtctgtgatagagtctatgttttaaccactgtcacttaattttgtttctgatctcaccagatacagtatccatgcctagtcagaactatagcatcatatctgaatttaacctctttggcttctcagccttcccccagcacctcctgcccatcttgttcctgctgtacctcctgatgttcctgttcacattgctgggcaaccttctcatcatggccacaatctggattgaacacagactccacacacccatgtacctcttcttgtgcaccctctccgtctctgagattctgttcactgttgccatcacccctcgcatgctggctgatctgctttccacccatcattccatcacctttgtggcttgtgccaaccagatgttcttctccttcatgtttggcttcactcactccttccttctcctggtcatgggctatgatcgctatgtggccatctgccacccactgcgttacaatgtgctcatgagcccccgtgactgtgcccatcttgtggcctgtacctgggctggtggctcagtcatggggatgatggtgacaacgatagttttccacctcactttctgtgggtctaatgtgatccaccattttttctgtcatgtgctttccctcttgaagttggcctgtgaaaacaagacatcatctgtcatcatgggtgtgatgctggtgtgtgtcacagccctgataggctgtttattcctcatcatcctctcctatgtcttcattgtggctgccatcttgaggattccctctgccgaaggccggcacaagacattttctacgtgtgtatcccacctcactgtggtggtcacgcactatagttttgcctcctttatctacctcaagcccaagggcctccattctatgtacagtgacgccttgatggccaccacctatactgtcttcacccccttccttagcccaatcattttcagcctaaggaacaaggagctgaagaatgccataaataaaaacttttacagaaaattctgtcctccaagttcctgagcgccagtttggtggtgatgaaatataataatgtgtatctccatagggctgttgtaagtgttcaggtatgtgaaaatatgtgtttgatacatactagctattgttttcccttccctttttgcttaagctcaagtgatcataatcttttctttatgagccattatgatgacctttatcccattatctgtgcctagaaatgtgttttctgtccacggacaggtggggatcatcacgtggatgtgtctgggcacttatgaacacagttcttcttgaatggacaggcaaaaaagattttattttcccctagtgtaagaaaaagcaagaataacatgatagtcataaatgccacccagcactgagctttttctatgtattggcactgtgtccagtgttttataaatattatccttttaattagaagaaatgtacaaaggaaaataaactatttgcctcagataaactggtttcttatttaaagttcctcactgtctttgggagagatataccctaagtttgtgtgtggatattaatatgttgagttgaatgaaagatgttagaatgcaaacgttgagagagggcaagaaggagatatatatatatatacacatacatatatacacacacacatatatatatacatatatatgtatacatatatatatacatacatatgtatacatatatacatatatatatatacatacatatgtatacatatatacatatatatgtatacatatatatgtatacatatatacagagacagagacagaagaaagagagagagatacagagacagaagaaagagcaaaagacagagagagagagagggagagagagaaagcaggtgtcaagtaaaaagagagttctttaaattttttatctgtacaggaaatgtaataactaagaatttggggcaaaatagaaaaaaggaggttggtaatagggctttaatatgtcctaataatagggctaataaggtagcctaataagatagccacgtgtctcatcccagcgtttttgacacagttgctctgcagtctcaatgtgtcattctaagatatgtacttccttgcctccaatggatgtatcaattttctggttttctgtttctggccattggttccaccagctgaggaatgaatattatttttacagtgtgactgctcttctaatgctactcatagtgccattcacctgtgcttcctgctgctgctggaatgtgaaggtcaacatggaaagagatttcattctaggaaagcagagatcatggccttaaaaagtcaaaaggtgacatggttggaagaagttttattctttgtttatgttataaaactccaaacaaaaacaaactatcctttcccttatcctgcatactctgggcaagactcgcatgtgtgcttctcatcgttgcatgtctgctatggttgcaccatagcaaccagtgagagaccctctgggcatatggtcacagatgatgaagtgacatagttaatgatggaaatggcattaaatgtgtcctatgaaagtgctacagaagcagaactttctatacaaataaatcaaaaatttttccaagagccaagctgttgtgagtgttaaccactttgttacctttttcttccactttcttttgactcatgttgctatggtatatctttctccatctgtttacttttcacttatatatgcctttatatttacagggttttcttgttaaaaaaaaaacttatatctgagtcttatttttttgaccccctgtgacaatctctgtattttaattgatgcgttttaattaataattaactaaatcgtttcttactatagtcactctgttatgctagcaattactaggtcttaatcttcattcctactattttttagtacccaataaccattcccacttcccccggaagccccaactacccttaacagcctctgttacccattctactttctatcttcataagttcaattgttttaattcttagcttccacaaataagtgataccatgcaaagtttgtctttctgtgtctggcgtattttactgaatatattgtcctcaagttccatccatgtggttacaaatgacagaatctcattctgaatagtactccatcatgtatatgtaccacattttctttatctattcaactgttgatggacactttgattgcttccaaatcttggctattgtgaatagtgctggaataaatataggacagcaggtatctctttgatacactgatttcttttctttggggaatatacccagcagtgggattactggatgttatggtagctgtttttttcatttcttgagggacttccaaactgttctccatagtggtggtactaacttacatccccaacaacagtgtacaagggttcccttttctcctcatcctcaccagcatttgttatttcctatcttttggatagaagccatttttactgggataagatgatttcttattgtagttttgatttccatttctctgctaaatcaatgatgttcaggatcttttaatatgcctgtttgctttttctatgtcttcttctgagtaatgtctgttcatatcttttgccactttaaaaaacatattttgtgtctgtgtgtatatagtacgtgtatatatttatgggtcacttgagatgttttcatacaggaatgcaataaataataatcataccatgcaaatggggtatccaccccctcaagcatgtatcttttgtgttaaaaacaatcctgctatacttttagttattttaaaatgtacaattacattattattgaatatagtcaccctgttgtgctatcaaatatcaaatgttattcattctaactactttttgtactcattaaccatctgcccctgctcccccaatcacccatcactacccttcccagcctctggcaacttcatgagttcaactgttttgatttttagatcccacaaatatttgagaacatgtgatgtttgtatttctgtgcctggcttaccaaaacctatggaatacagtgagagcagcaataagaggaacgtttatagctctcactgtatcccataggttttgatatattggggttccattatcatttgcttaataaaatttttcaatttccttctcaatttctttgtggaccaactggtcattctggagcattttgtttaattcccatgtgtttgtatagtttccaaattttcttgtattatttctttccattttaggccactgtgatcagagaagatgcttgatattatttcagttttttgaatgttttcagacgtgttttgtaatcaaacatctggtgtttccttgagaatgatctatgtgctgaggaaaagaatgtatattctgcagccattggaggaaatgtcctgtaaatatcaattaggtccaagagacaacaaccttcttgtctctttttatagtttttgtcttgacatctatattgtgtgatataaatataggtactcccatgctttttaaacttccattgacatgatgtgtctttttctatcccatcattcttggactaagtatgtttttacaagtgaaatgtgcttcttgaaggcaacaaatcattgggtcttttttattttttaatccacggagccactctatgtcttttgattgaagagtttagtttatttacattccatgttatgattgataagtaaggactgtcttggaaaggctttatttctctttcatctttgaagaacattttcactgaatttactattctagggtaaaagatttttccttcagcactttaaatatgtcctgtcactctctcctggcctgcaaggtttctactgaaaagtccactgccagatgtgttggagctctattttatgttgtttcttttctcttgctgcttttaggatcctttctttaaccttaaccttttagagtttgattattaaatgccttgtggtagtctactttgggttaaatgtgctgggtgttctgtaaccttcttttacttgaatattgatatctttctttaggtctgagaagttctttgttattatccctttgaataaacactctaccccaatctctctctacaccttctctttaagaccaataactcttagatttgcccttttgaggctattttctatattctgtaggcatgcttcatttaaaatttttttttcttttgtctcctctgactgtgcattttcaaatagcctttcttcaagctcactaattctttcttgtccttgatcaattcttctattaaaagactcgtgtattcttcagtgcgtcaatttcattttttcaatgccagaatttctgtttgattcttttaaattatttcagtctctttgttaaatttatctaatagaaatctgaatttttttctatgttatcttgaatttctgtgagttttctgaaaacggctatttagaattctctgctgaaaggtcacgtctctgtatctcctggatcggtctctggtgacttatttagttcctttggtgaggtcatgttttcctggatggtcttgatgcttctagatattcatctgtgtccggtcattgaagaattaggtgtttattgtaatcttctcagtctgggtttgtttgtacccatctttcttaggaaggcttccaggtattcagacttaggtggtataaaatacgctgtatctgcattagggggcaccccaagcccaataacactgtggttcttgcagactcataaaggtaccaccttgatggtcttagatgacatttaagagaattctctggattaccaggcagagacacttattttttcccccttactttctcagaaacaaacatagttgctctcactctgttctaagcctccaggagttggggaagcactgacacaagcacctctgtggccatcagcactggagctgtgctgggttagacctaaaaccagcagagcactggatcccacacaaaacctcctatgaccactacctggctactgcctaagttcactcaaggccctgggactccgcagtcagcaggtggtgaagccagctggacttgtgtccttcccttcagggcagcgagttgccccatgccctgcgtgggtccagagttgctagcgactggtattattagtactgtgtgccagggactggcatcaaaaactttagaaatctacctggtattgtatttattgtggctgagctggcactcaacccacgagatgcagtccttcctactagggccattgacatttgccaacatgagtcacggaacctgttttaagtcttttaagtatattaaccaccttgttttgcattttacaaatgagaaattaagtccgggagatatttaagtgaccacccacagtcacacagctggtggagccaggctgtacacccccagactacccacccagtctcacattgtgccaccctcaccaccgggctgtgctccttcacgtctataaatgggcgtttcagcagcacccgcctcacaaggtcatggtaataactaaaacagacaatgcatgcaaaatacacaaggcagactaagggctcagcaagtgcaactcactgttcctgctgttactgcgattgctgtgtaagctggatatggggtctgatctggatcccacagggggcagaaacatggccttgcgctgtctgagagaagggccctaaaggtccagcctgtcctcaccacctgctctctttggctgtgggtaatggctaggagagcaacctcctggacacagggagccttggcctgaatctagaagagttttccatggagaacaacaggaaaccttgaactcctgccagatgttaaggcagactcataggtggattttggggaaggacatcagctattctggggctgggaactggacaacccatggagcccagcctcccatccaatgaagacgtaagctctgcacagcccagctacggcatccctgacagtctctacttagatgcctcccagcatggagagctcagcacacacacacgcacagacaccctattcgtttacagaatattagaaggtagatactgaatggcaatgggccttatgtaaccagtcataaaattgatgaggaggggggttgtttaaaatgtgtcttcctttacgtgcacacatatcaagggaggcaaatacgatgctaagagagtgaggtacagaacaccaggtatgtctgcaacattttcacagaaatgaggtggagagtgcataaatgcatatgcctctatttgtcatatttgcataaataaactctagcatgaataacttttcagcttaacatgtacttgtttatgtatgtataactatttatatgtttacatatttcacttgcaacatttattccatctgtgtgtataaccagtaatcctccccggtctccactctgtaggaccctgcaaggtgcctggtcattggactttctactgcaggagtgtgtgggatgcacctgagccagagttccctgcagcctaggaggccaaggaatcccagggcagtcaatgtccctggtgctgaaggagatggatccccttccttcccctgcaccctcctctcaccctcgcagcatcctccagacacctggacctgctgtcaggatccaaaagcagtgctttggaagccttagggaggtaaccactgattcccatgcttctactcacattggctgctcagcaaaagtaggaaagtccctactgcaaaaatgtcaatgtcccctctggtgcctggcaactgccagggccagccctacttcttgtatcttccatgtttgaaattttaacatttgaactcacacccgaggttgaccagaagacccagatagctctgagctttgcacctgtgacccactggtatggcattgctttcatgggagtaactgggatttggcagcctgatggggctgatgcactgatttgggggtcactccacatgaacccacactgaattcagggctgtggcatacagacagatcaacagcaaccttgggtgtgggtttctatgaacctgtgtgtctgactttgtatattcattttctggtgtcatctgtagtctgcagtaactaataagggcaaggatggtttttattgaagaagacacaccctttctataatagaaaatgtccaccccctgacctggtgcagtggtacacacctgtaatcccagcattttgggaacctaaggctggcaagttgcttgacctcagtagttagagactagcctggccaacatggcaaaaccccatctctacaaaaagaaatacaaaaaaaaaaaaaaaaaaaagcccaggcatggtggtacagacatctagtcataactactcaggaagctggggtgggtggattgcttgagctcagtagttagaaactagcctgggcaacatggtgaaaccccatctctactaaaaatacaaaaaattagctgggcatggtggcgggtgcctgtaatcctagctgcttgggaggctgaggcaggagaatcacttgaacccaggaggcagaggttgcagtgagccaagatcaagccactgcactccagcctgggcatcagagcaagactccgtctaaaaaaaaaagaaagaaaaagaaatacacacacacacacacacacacacacacacacacacacacagcccacgcatggtggtgcatgcctgtagtcccagctacttaggaggctgaggtgggtggattgcttgagcctgggaggttggggctgcagagagctgagatcacaccactgcactccagcctgggtgacagagtgagactgtctcaaaaaaagaaaagaaaaggaaaggtccacccctgtgtaaactgccaaatgtttcccttcttgctcagcaatatctctgctgttattatcaatgcatgtcatggggagatgacacagatattgagaaggcactttgcctctcacaggttttctccacaaatttagttcccctccatattgctggggaaagtagcttccccaagaatgtgcctggagatacctgttgcattctctctctctctttctttctttttttgatagggtctcactctggcacccaggctggagtgcagtggcacgatcatggctcgttgcagactcaatctcccaggctcaagcgatcttcccacctaagcctcccaggtatttgggactacaggcacatgtcgccatgcctggctaatttttgtacttttggtagaaacggggtttcgccatgttgcccaggctggtctcgaactcctgagctcaagtgatctgccaacctcagcctccgaaagtgctgggattacaggcgtgagccaccacacccagcctctggtgcattttcccttccaggtttcttgttacatgaatttgtaaagatatttgtcagagataaaggtgtggttatgacaacgtaggagttgttcttacaactcctttctcagagaatgcagtcaaagttgttcatgtataactcatgtataacttcaaaatttaaagacagaatatgatgcagcaaggaaaagtgagctaatatttgcagagaacctttcagtgatcaaacgcattgctgggaaaatttcatagattgtatcatttttgtgtcttttagcctagctacaatcataacttttcttttttctttggttttcagcagttttgactactgtgtgtctagggctttgtgtgtgtgtatgtatatatttgtgttcatgtttgtctatatgcactttttagaagttatccctttggaggccaggtgcggtggctcatgcctgtaatcccaacactttgggaggccgaggtgggtcgatcactttaggtcaggagttgagatgagcctagccaacatggcgaaaccctgtctctagtaaaaatacaaaaatcagccaagcctggtggcatgtgcctgtaattccagctactcaggaggttgaggcaggagaatcgcttgaacccgggaggcagaggttgcagtgagccaagatcatgacattgccctccagcctgggagagagagtgagactccatctcgaaaaaaaaaaagaaaaaggaaaaagaaagaaaagaagttatccttttggaattctctgagcttcttgaatctgtggttgattatctctcatacttcctagagaattctcagaatgtctgagtcccatacccactcctcatgtgatgtgtcctcagataagtgaactaacctctgaaactcagtttcctcatctgtaaagtgaaaataataatattaatgaggacatgatgattggcagttcataagcactggataatgtcagctatagatattgttaaagggtgtggtccttccttagaccgagcaaaattggcacttaactgggctctgcacctctgggacccacactcttcagtgtcttctttgaaggaggttctctgggacctgaaatcagccaggatgttcattgactccaggtggggcagtccaggccaacactgattctcagtcagtccaaccacaggaaaatagctccccccaaaaaaatgtccaaagtcccctttggtgcctggaacctggcagagcaagtcctgatccccagttcttccctttcaggcaatcatttattttattttatttttgagatagcattttgctctgtcacccaggttaaagggcagtggtgcaatcacagcttactgcagccttcacctcccaggctcaagcaagcctcccgcctcagtctcctgagtagctgagactatagataggctcataccaccacacccagctactttttgtattttttttgcagaggtggggttttaccatgatgcccagactggtcttgaattccttggctcaagtgatccacccacctcagcctcccgaagtgctgggattataggcatgagccactgtgcccaacctttgaggcaatcttgatcattaaccccaaatgtggggttgaccatatgtcttaagttgttctggacttctacttatgcttctttgtcatggcatttttttttatgaattcacctgggattttgttaatagtgcaaaagagtttattttggggtccattcatcttggacccaggaggagttacaggctctgggtttcaaatggttcaagatccaccacctgagggcctgaggtatgtggggacctgtgtttccaatcctgtgtgtttattatcaggcgctgtctctggtccacagcatccaaagagggcaggtatggtagcaggagtcatttcccctgtgcaccctcagctgctgacccctgatataaccaccagattattgtcagactctgagccacatgctcagccatgtctcaaagatggcctctcctccaaaggttttgacatcattgctctgtaacaccaatgagaccttccagccgatgttttctttagagcccttggtttggtgtctagccttatcaccaacatgccattgacctcagggagctatgagtctgtcttggtctgtttgaacaactatcacaaaatactgtagactgggtgatttgtaaacaactgaatttatttcccatagttctgcaggctgagaagtccaagatcaggactgtggctgatctggtgcctggtgacagcccacttcctggttccagaaggctgtttcatgcctgtgtcctcacatggtggaagtggggaatcagctctctgggcctcctttataagtacaccagtcccattcgtgagaactctgccctcataaccttatcaccactctatgcccccctccttctaaaaccatcacatggaatgtaaggatttcaacatatggattttggaggtacaaaaatcttcagtttatagcagacccaaacctctgaatctaggtttcctcattgacaaactagggataataatggcactttccctactagggagagttggttgtgttcatatcaatactgtatgtgccacctgctatgtgcttaaaacatctgcacggaggaatgttattacaggacgccgaacaccaggcttgagcatttggactttggcagtagaaaaggctctgtcattcaactccatgctggaggcatgttttgagttgttactgtattcccatcactgtcctagaccctaggaacacccagatagatcatatccagtcccagatacatgatctggcaaccacagtgcaatgtgaagagttgtgatggagacatcagctggacattatgaaaagatgtggaggaaggaatgtttcctctgggttttaaagggtcaataggagttctcttggctgacaaagaaaatagcattccaggcaaaaggactgaactcactaaaagtatggagtatgaaaatgcatgattggatatatctatgtgctagggcagtggggagggggagataatccctgactgaaggctgcactatggaatttgaactggatcctgcaggggccagagacatgactttgcactgtcttggagaagggccttaaaagctcagcctggctgggtgcagtggctcacacctgtaatcccagcactttgggaggctgagacgggcagatcatgaggtcaggagatcgagaccatcctggctaacacggtgaaaccccatctctactaaaaatacaaaaaaaaattagccagacatggtggtgggtgcctgtaatcccagctactcaggaggctgaggcaggagaatggcgtgaacccaagaggcagagcttgcagtgagccgagatcatgccactgcactccagcctgggcaacagagtgagactccatctcaaaaaaacaaaacaaaacaaaacaaaaacaaaagctcagcctgtcctcaccattgggctgtagacagcaactttgtgacaaccctccttggcacagggagactttcatctaaatccaaaagatatgtgtatggaggagtagtaacaggagctctagaacaactgctaagcattgagcaggactcacaggtgaattcttggggaagaggtcagctgctctggggtgctgggcaccacccagcttcagcatccccaagagccaataatctctgcttgaatgcccctcagcacagagagttcagtgtgtgtgagcctgtgcatgcttgtacacacacacgctgccttaacaaaacacgtaaaggtaaatactctaaagcagtaagcatcaaacataaccagttggaaaatcaataaggagggggattgtttaacatacatcttaaaatgctatgtgcacacatgtcaagagagttaagatatgataccaaggataagaaccaaatgcacaacaccaggtatagtctgcaatattttctctaagacagggtgaagtgtgagtaaatatatatactcatatttatcatatttgcatagatgaactctgaagtgaataattttcaacttaggatatattaaacctttatttaatttcaagtgtggaggattttctttctcttttgacaatcagtgcttctcccaagcccccactctgtgggaccctgcaaagcgctcaggccttggactcttaactgcaggaatctacaggatgcacatgagcaagcaggcgctcctgcagccacagaggccaaggagtctcaaggcggtcgctgtccctggtgctgaagagggaggagcctctacaccccctgcaccctcctctcaattcccagaacacctggcacaggatgaagtccgggttgtgcttcacatcagcctgttcctgggtcactgggagattcaaaagaagagctatcagggactggcaggggtggccaggagtcctcgggaggtgtccactgagtccccagcttgtgctcactttcgccactcagctcttcctgcagctatatcagcttcttagaggatagtgggtggaggatgaggtcaaatgtgcaatccccagcccccaaccccactccagggttctcagaacccagaaaccctccaggatctgtggttcaacccagcttttttctagctcctgtttcagtccccaaggatcagaggatttgtccagctcccactgcacactgcccccaggaccagctctactcacccctgacagcaggcccactagtatcccccaattcagaactccagaagctcccccggtgagctcagctacatggtggtggctgactccgggggtctggagggtggtcaggacaatctcagagggagagaagggccatgcagccagtgtctgggatggggcttagctctgtgggcctgtgggctactcttttaaaaaaaaaaattttgagacagggtcttgttctgtcaccaggctggagtgcagtggtgcaatcgtggctcactgcagccttgacctcccaggctcaagcagtcctcccaccttagcctcctgagtagctgggactacaggaggatgccatcactgtgggctgctcttgaaaaagagctgcttcctctatttctggaaattctcctcccctccctttatcctctctcgatactctctcgaccccctccccaagcccacactgcatcctacacacacctgatgccctttctcttagaagttaccatgtgccacttctgctaaataacatcctctcgccatctcattaattgcttacagcagcctctgaggtggattcatggtgaaaatgatgacactgaggctggatgaggttgtggctctcacccagggatgtacatcttggaagatgcagagctaggacttgaatcagctctgcctgaccccagagcctgagttcttaccacaaagccaccctgccaccagaccctgatgttctcgtcatgttcaccactggctgtttgtaaggggtcacttgccattgagtcttgctccaagttcacctgatgaaacacatgaggtgtctccaaggctggggacaaaaaagaggacacagccccctctgcatcccttgccatccccacagcagtcgagctactccaaggccctggctatcccttctttttcatctctgccctgactctgtggggtccttcatttgcgagatgggaactggggatcttgggtcactccaatcaccccagaccacaccaggccagccccggctcttttatcagaacaatgccgagaaaagtgaccactacaaacagagtcagggtcaccgtcaggcgatgaactccagggatttaatgtttgatcccatcattctggggagaaattaattcaaaggaggtctggtagcagagaagtacccaccaacggacacgccctgacctcggggttttctggttcactctctggcccactgggggtgaactttctgatgttgagttctgtcctgataagggagaagatatctacatgttgacctctcctctccctgcctggactctggattctaggttgaagtattatttatgctgaggatttacaatgtctgatatatctcgctgagccttctgcacagagatacactgggagtggaggctaatcatgtcaaaggagaagcaccataagcccacactccagcctatcagagtggattaaaggtctaccctgcccaactcttacctcacctgctcccatggcctgggtggagggttggaccccaggactatgaggttgtgtggagacttccagccccatacctgccctcagaccagtcttcagctcactctgctctgggctgcccagatttatttatttatttatttatttatttatttttggagctggagtctcgctctgtcacccaggctggcacaatcttggctcactgcaacctctgcctcctgggttcaagcaattctcctgcctcagcctcccgagtagctgggactacaggcgtacaccaccatgcccagctaattgttttgtatttttagtagagacggggtttcaccgtgttgcccaggctggtttcaaactcccgagctcacgcaatccgccctcctcagcctcccaaagtgctggggttacaggcatgagccaccgtgcccagcctgggctgcccagatttacacaaatattctccactttacacaactctacacaaatattctccactagttcttaaaagaaaactgcctccatcaaatctcacacatttccttcctggctcagtccagggagaacattatctagatagcttgtcatcaaataaaatggtgggggagagaactcaggcagaggggcacaaaacggattgagcagcaagcttcctctccaaccatgattttctgtccatggtcatggatactccctggactgctgccagcacatgtggttcatgctaggtttctggtcaatgtagcatccaaaatctcacatcttctttctagatggagctgtggctatttcaacttaggcaagttgtgcttgagaatcttctcctttaacactacagggtaaggtagttccccaatgcttttatttactttcatttacatttagaaattaggaatttaattcaacaagaagagaggagagaatcgctattattgagtggtttctacttccgaatcctgtaatcagaattttttctgtaattattacagtgctaggaccctcagagctttaaagccctttttcgagattccaaagctagtaagtggttctgctggcatttgaaatataatgtcactgggtttaaaattacttttcttgggccgaaggtggtagctcacttctgtaatccagcaccttgggaggtcaaggtgggaagatcgcttgagcctaggagttctagaatggcctgggcaacacagtgggacttcgacgctacaaaaaattaaagaattagccgaggctaggcgcagtggctcacgcctgtaaccccaacactttgggaggctgaggcgggcagatcacctgagcacaggagttccaggccatcctgggcgacatggtgaaaccccatctctactaaaatacaaaaaattagccaggcgtgatggtgcatgcctgtagtcccagctactccggaggctgaggcacgacaatcgcttgagcccaggaggcagaggttgcagtgagctgagatcaagccactgcactccagcatgggctacagagtgagactccgtctcaaaaaaaaaaacaagaattaagaattagcctggtgtggtggtgcatgcctgtagtcccagctactcgggaggctgaggttgggggctcacttgagcccaggagtttgaggccctgattgtgccacagaactccagcctggagttcagtgacagagtgaggccctgtctcaaaaaataataaaaataaaataaaattagttttctttcctgtatgccactctgcctgactaaccttaaaaaagtaatctctttaaacacctgtgcaatttacctaactatatttttcataatgtcctttgacctttatacttattacataaatattttacatgcttatcatttaaatatgtaaacaactgatatagaccttgtgtttctcataatttttatcagctacataatgttggatcatatttatacactatcattcacctttgatctatccaaaatatttgaggaaggagaaagaaaagaataaagaaataaagtgtgatataccatctaaatgggcctacaattgctgaacattgatctgtttccatatcataaaaatattcctaggtttggtgcagtggctcatgcctgtaatcccagcactttggggggcctaggcaggtggatcacatgaggtcaggagttatagaccagcctagccgacatgatgaaaccccgtctctactgaaaatacaaaaattagccaggtatggtggtgtgcgcctttcatcccaggtactcaggaggctgaagcaggggaatcacttgaaccccggaggtggaggttgcagtgagccgagattgtgccactgcactccagcctaggggaaaaaagtgagaccctgtctcaaaagaaaaaaaagaaaaaaaagaaaaaaaatgtgacagacaatctgaataggcctacaattattgaaaattgtttccatgtcacaatctgtttccatgtcacaaaaatatttctctctagtattttgttctgacagctcaaatatagtaggagaatactaattttaaaaagagaaatgaatcaataagtaattaataaacaaccttccagaacagaaagcctcaagcccagattgatttcactgataaattccacgaaacatacaagaaagaaagtatgctaattttctactatctcttttggaagacgaaagcagagaaaatatttctcaactgtttctatgagaccagcactgcgctaactactaaagcaggcaaaaacattaccagaaaataaagaaaaaaaggaagggaggaagaaaagaggtaagggggaaatggagggagggaagaggaaaggaagggagggagggagggaggggcggaggaagaaaggaaataagaggaaacgatactgaccaatatttctgatgaacatagatatctcaataaaatattagcaaattgaatccaacagtgtataaaaacaactgcacaccacaaccaaatggcatttatcccaggggcataagattgtttgaatatttataatcagttaatgtaaaccatcatatcaacaggctaaagaaaaaattatctaatcataacaatggatgcggaaagagcatttgataaaaaaattaaacaccaattcgtggctttcttaatgctcagtaaaataggattggaagggagcttcctcaacttgataaagaatatgcaaaagtaccctacagctaacatcatacttaacggtgagaagctagaagcttttccgccaagatcagcagtaaggtaaggatgtcctctcttaccattgctgttcaacattgtactggaagtcacagttaatgcaataagataataggagaaaattaaaagtactcagattgtggctgggggtggtggctcacgcttgtgatcccagcgctttaggaggctgaggcaggcagatcatgtgaggtcaggagttcgagaccagcctgtccaatatgatgaaacccagcctcaactaaaaatacaaaaattagtcgggcatggtggcatgcacctgtaatcccagctacttgggaggctgaggcaagagaatcgcttgaacccgggaggcagaggttgcggtgagccaaggtcacaccattgcactccagcctgggcaacaagagcaaactccatctcaaaaaaaaaaaaaaagtacgcagattgtaaaggaagagacaaaactgtctttgtttgcagaagccatgattatctatgcagaaaagtcaaaagaatcaacaacaacaaaaaaaactagaatttataagtctttatgaaagtttgcaggatataaggttaatacataaaagtcaatcacttttctatatagcaatgaacaagtggaatttgaaatcaaaaccacaataccattgacactggtaccctgaaaattgaattacagatgtatgaatctaacaaaatatgtacaatatctataggagaaaaaggacaaaactgatgaaaaaaatcaaagaactaaatgaatagagagatattccacattcatgattaggaaaactcaatgttttcaagatgtcagttcttcccaacttgatctatagattcaaagcaatctcaataaaaatcctagacaggtttgtgaaatggggaaatgattccctatttaataaatggtgctgggaaaactggctagccatatgtagaaagctgaaactggatcccttccttacaccttatacaaaaattaattcaagatggattaaagacttaaacgttagacctaaaaccataaaaaccctagaagaaaacctaggcaataccattcaggacataggcataggcaaggacttcatgtctaaaacaccaaaagcaatggcaacaaaagccaaaattgacaaatgggatctaattaaactaaagagcttctgcacagcaaaagaaactaccatcagagtgaacaggcaacctacagaatgggagaaaatttttacaatctacccatctgacaaagggctaatatgcagaatctacaaagaacttaaacaaatttacaagaaaaaatcaaacaactccatcaacaagtgggcgaaggatatgaacagacatttctcaaaagaagacatttatgcagccaacagacacatgaaaaaatgctcatcatcactggccatcagagaaatgcaaatcaaaaccacaatgagataccatctcacaccagttagaatggcgatcattaaaaagtcaggaaacaacaggtgctggagaggatgtggagaaacaggaacacttttacactgttggtgggagtataaactagttcaaccattgtggaagtcagtgtggcgattccttagggatctagaactagaaacaccatttgacccagccatcccattactgggtatatacccaaaggattataaatcatgctgctataaagactcatgcacatctatgtttattgcagcactattcacaatagcaaagacttggaaccaagccaaatgtccaacaatgatagacttgattaagaaaatgtggcacatatacaccatggaatactatgcggccataaaaaaatgatgagttcatgtcctctgtaggaacatggatgaagctggaaaccatcattctcagcaaactatcgcaaggacaaaaaaccaaacaccgcatgttctcactcataggagggaattgaacaatgagaagacatggacacaggaaggggaacatcacacatcggggcctgttgtggggtgggtggaggggggagggatagcattaggagatatgcctaatgttaaatgacgagttaatgggtgcagcacaccagcatggcacatgtatacatatgtaactgacctgcacgttgtgcacatgtaccctaaaacttaaagtataataaaaaaaaatcctagacagttattttgtgaatatcaacaacttgatcctacagtttatgtgcaggggcaaaagacccagaatagccaacacaatattgaaagattaaaacaaagttggagggctgacactatccaacctcgagacttaccataaagctacagtaatcaagaaaatgtcatatcagtgaaagaaaagacaaacaggcccatagaacagaatagagggcccagaaatagatcaacgtaaatacagtcaactgatgtttggcaaaggtgagaaggcaacatgatggagaaaattagtcttttcttttcaaaaaaaaagaaatggtgctagaacaactggacatccacacacaaaagaaaatctagacagagatcttacacccttcacaaatgtttattcaaaatggaccatagggctgggcaaggtggctcaagcctgaaatcctagcactttgggaggccgaggcgtgcggatcgcttgagcccaggagtttgagaccagcctgggcaacctggcgaaaccccgtctctactaaaaatatgaaaaattagccagtcgtggtggtgcttgcctatagtccctgctactcagaaggctcacctgagctcaggaagttgagcctgtggtgagccaagatcgtgccactgcactccagcctgggcgacatgagtgagaccatctctcaaaaataaataaataaatgaatgaaaataaaaactaaataaatatataaatatataaaataatttaaaaatttaaatggatcatagatctaaatgtaaaacataagattataaaactcttaggaaataacatagagaatctagatgatcttgggtttggcaataaatttttagatatgacaccaaaggcataatttataaaagaaaaaatgataagctagacttcatcaacgtcaaaaatttctgttctgaaggctgggtgtggtggctcatgcctgtaatcccaggactttgggaggctgaggcaggcagatcacctgagatcaggagttagagactagcctgcccaacatggtgaaaccccatctctaccaaagatacaaaaaaattagccaggtatggtggcacacacctgtaatcccagctacttgggaggctgaggcaggagaatcacttgaacccgggaggtggaggttgcagtgagcagagatcgcatagctgcactccagcctgggcaacagagtgagactctgccacaagaaaaacaactaaaacaaaacaaaacaaaaattctgctctgcaaaagacactggtaagaggataaaaagagaagccacagacagtgaaaaaaatatttgcaaaagacatgtctgataaagtactgttatccaaaacatacaaagaacacttaaagctcaacaataagaaaatgggcaacccaattcaaaaataggcaagaggtctgaccagacacctcctcaaagaaggtatgtggatggcaggtgagcttaggagaagatgctccacatcctatatcatcagggaaatgcaaattaaaacaacaatgaagtatcagcacacgcatattaaagtggtcaaaattcagaaaacttacagcaccaaatgctggtgagaaggtggaacagcagcaactttcatcattgccgccgagaatgcaaaatggcacagtcactttgaaagacagtttggcagtttcttacacaactaaacatactcttgccatacaattcaggatatgtgccccttactgtttacccaaaggagttgaaaacatatgcccacacactgtttatagcagcatactgatgttcacagcagctttatttataattgaccaaacttggaggcaatcaagacgtccttcagtagctgaatgggtaattaaactgtgatatgtgcaaacaatggaatatattcagcatgaatagaaatcaaccacgaagtcatgaaaagacatgaaggagcttaaatgcatattacaaagtgaaagaagccaatctgaaaatgctacatattgtattattccaactatacaatattcttgaaagggaccagcctgggcaacatggtgagaactgtctctacaaaaaaaaatatatatatatacaaaaattagccaggcaatgcggtacatgcctgtagtcccagctactcaggaggctgaggtggaaggactgcctgagtccaggaggcagaggttacagtgagccatgattgtgccactgcactccagcctggatgacagagggagaccaaagaaagaaggaaagaaagaaagaaaaagagagagagagagaaataaagaaagaaagaaagagagagaaagagagagagagagagaaagagagaaagagagagagaaaggaagaagaaagaaagaaaaaagaaagaaagaaaggaagaaagagagagagaaagaaagagagaaagaaagagagaagaaagaaagaaagaagaaaagaaagaaagaaagagagagaaagaaagaaagaaagagagagagaaagaaagaaagagaaagagagaaagaaagaaaaagaaagaaagagaaagaaagaaagaaagaaagaaaagaaagaaagagaaaggaagggcagggcagggcagggcaaggcaaggcaaggcaaggcctatggagacagtaaaaaatatcagtggtttccaggagatagagggaagggaaggatgagtaggtggagattatagaagatttatggcagtgaagctattttgtatgatactataatagtagacacatgtcattatacatttgtccaaagccatagaatgtacaacaccaagaatggactctaatatgaactatgtaccgtgagcgataataatgtgtcaatgcgggttcattcattttaacaaatgtgccactctggtaagggatgttgatactcaagaggcttgtgtgttaggagggcggagtaagggtgtacaggaactctgtgttccctgatcaattttgctgtgacactaaaacggctctaaaaaataaagtctattgtccaggcacagtggttcacgcctgcaatcccaacactttgggaggcttaggtgggagcatcgcttgagcccaggaactcaagaccagcctgggcaacatagcaaaaccctgtctctaaagaaaattaaaaacattatccaagcatggtggcgcacctgtggtcccagttactggggagtctgaggcgagacgatctcttgagccccggagttcgaggctgcagtgaaccatgatcacaccaccacactccagcctgggtaacagagcgagactctatctctaaaaaatgtctattttaaagaagttttaatacatgcagtggaaacacacaaaaaataagtcagatgctacaaagtgatctgtgaaaactgaatttcccttccacctgcaaaacttagtctcctaagacccactaaatttaattgccagttcataaatgtatctcttccagatacactttagaatcttcttgttgagttccacaaatatcctgctgggatttcatttggactgcaatgatttatttaattaaattttattttattttaagttccaggatacatgtgcaggatgtgcaggtttgttacacaggtaaatgtgtgtcatggtggtttgctgcacccaccaacccatcacctaggtattaagccccgcatgcattagctatttatcctgatgctctccctccccctgaccctcccaacagactccattgtgtgttgttcccctcgctgtgtccatgtgttctcattgttcagctcccacttctaagggaaaacatgccatgtttggttttctgttcctgtgttagtttactgaggatgatggcttccagctccattcatgtccctgcaaaggacataatcttgctccttttatggctgcctagtattccacggtgtatatgtgccatattttccttatccagtctatcactgatgggcatttgggttgattccatgtctttgctattgtgaatagtgctactgcaatgaatttataggttcgttcaggtatcttcccatttaattttgtgtttgtgcttgaaatttatgagaactgtttcatgatccctcgttttaatagcaccattttcttctctgggtgcactgtcatgtgaagaagtctctggagagaatagtgaggagtcaagctcctggttaaaaacctacgtgagggcaggcacagtggctcacacctgtaaccctggcactttaggtggccaaggtgggtggatcacttgaggtcaggagtttgagaccagcctggccaacatggtgaaactccatctctactaaaaatacaaaaattagccgggtgtggtggcaagtgcctgtaatcccagctactcaggaggctgaggcaggagaatcacttgaacccaggaggtggaggttgcagtgagccaagatcacgccactgcactccagcctggatgacagagccagactctgtctcagacaacaacaacaaaatcccctccatgtgatctttcaagcctgaccgtaggcaattatagaattacagaggctttaactggcagggctcatgggggaaattgtcctccccacaccagacccagtgcataatcaatgcgtcacagtctcctaggagagttgcagtcaaggactcgagtccccttgaccagccatggtcttacacgtatctcctttcaaagttacctttattagttaccttcagcggagggcttccttgggcacctctgccaagacatccttgtcatagaaaaacaggggaaacatgaagacacactttcacccactatgactcagtacccagtacttttccacacctagcccttcctcctcttcctccccttagcctccattccataaaactgcagaagccttttgttgtaggattgtgcagcagtgagatgacccccacgtctgtgcaatctaccttaccctcaaatcaccatttggtgatgcgagtgggaaaaaatggaatggtagaagctggtgctttctctgatggagcctcattcctgtgctatcacagcaagtgatgaaagtcttgactgttgctttagtgtgggtgatatggtttggatgtgtccccacccaaatctcatctagacttgtagttcctaaaattctcacgtcatgggagggatccagtgggaggtaatcgaatcatgggtgtggtcactcccatgctgctgttctcatgatagtgagtaagttctcatgagatctgatggttttataaggggcttttcccacttttgctcagcacttcttgctgccaccacgtgaagaaagacgtgtctgcttccccttccaccacaactgttaagattcctaaggcttcccaagccacgctgaactgtgagtcaatcaaacctctttccctcataaattacccagtctcagttatgtcttcattagcagtgtgagacctgactaatgcagtgggcttgctatcttcactgggtccttcaacactgggcagctcagctctctctccttcttagctgagcccatgacaaatggaaatgagcaaattattgggctgtcttttcttccttctgttgggtctgttgcttggagattagttctgtttcatctggttcttcctcttttgaggcaagacaatagcagagggaattggagaattggaggctggataaaggatggaatgagtaggagtagaagcaggataaagaggtgggtgagcaagaagcaagataataagcagaagttgagcagccaaaacaaaggtgagataaaataagtgagtaaagagaccccatggccagcaagatctggaccaaacctgtcaggggcagctcctcagagatgggcatgtgcatttgaggaaaaggtatccttaaaatgaccgcacatgatcatcagctacttaaggttcatgcatatggactgcatatcgtgcatgtacttaaaagtatgggatggaggcaacatgcaagtgcacaagggtcaaagtaactaagtaacccacctatcaatcaaaaggcagacactggctaaagattaggcagccttgggaaaagaagagaaaaaaacatatcaaagaaacccaaatacacctaactggtgctgatctcatttctcaaaggtcagtccactctcccttttccaagagtgtaatactgtgcttaataaacttttgctgctttgctatctgtgtgcatctcacacaattctttgttcagggcatgaagagcctggaacagcgtgataccatctggtaacactttaacgcccttaggtaaatgctgggtaaacatggattgccctgctgatgagtgagggaccatgttgattattattgcttttgttctctttggttttagatttacttccacatcaggccttttggtagatgggtgggtcagaccctatcaacaggcatgggttgggggcttgcaggcagcctcaagactccttccccatagctaaatttaggaagacttgacttgggaaggctgaggctttcctgaatttcttttagtgttctattctttgttgcattttttctctgttcactgtggagatctggagcaagcgctcattggatgtacttctcccccagactccaaaacccattgggatgcaccactcccacacctatagagagaggaagagagggagaggaggaggagagagtggcagcatctgtcctttctgagaatgtgaactgagacgccaaaacagatgcccctgtatcaactaagacgggccctaacattaaggagagtgaagcagtgtccttgtctggggtaaatgctcaaggttcttgtctcatgccagggaaattgaggatgcagacacacaagaagtgagtttaagagtggaagtttaataggtgaaagaaagagaaaagagaatagctctctcttctgcagagagagaggggctcccaggtgggacttccagtccagcaaagtgcatggggttttatagactagcttgatgaggcagtgtctgatttacaaaaggcccaaagattggttggaccaggtgtaccatttacatactgcgagaagaagctggccaccccaccctaatattttattatgcaaatgggtaatctacctgacctgcgccacgttacctctttctttactgtacatgtggttgacaaagaaaaggaaagatggagcagccatgttgaacatgtctagtgcccaggcagccttttcctattggcacagctgctatgcaagcttccatcttgcttatctatctctgcagcttgattttacaggctgctgtttattagaaaagaaatgatttggggttgcttttcattaaaaggaaaaccttactgagtgaggctaagagtgaaggattaataggcaacagaaagagaaaagagaatagttctctctcccgcagagagataggggcgcccaagtgggtcttctagtcccgtggcaaagtgcacagggttttgtagactggcttgaggaggctgtgtctgatttacatagggcccaaaggttggttggaccaggagtgacgattacatagtgctgcaaagaagctggccatccaccctaatctttcattatgcaaatcgattttctacctggacagcagcatgttgcctgctccttactatacacgtggttggcaaagataagggaagagggagcccccacgttgaaaatgcctggccctcagatagccttttcctactggcacagctgccagcattctcccttgcaagcttccagcttgcttatctatgtctgcagcctgattttacaggctgcttttgttagaaaacaaatgatttgggggctgcttttcattaaaagggaaactttactgaggactctcttaccctcactacctgcctaaataatttctttttaatgcctgtatcatttaggatagaaattcccaggatccgtggtgcttccatagcaaaggaagaacgtctccagggagatgactttacagttgagccctggatgatgagattcgatcatgaaagaattggagaagagcatcctgagggcagggacaggcaagtcaaaaggtcccaagacaagaaaagatcatccatgcgggggccaaggccagggtggccacgaagaagggagaagagctggagaggagatgtgaagagttagcagggctcagtggtgcacagtcccttaggctgtgaaaggagatcagcatctgtagccgaattttattttgagacattaactgaagctccttctattctcctaccccttacccttccaggtgctcccactgacagagcaggagcatcgccatcttggacaagcaccaccattttaaagtttgccttgatcaaaactgcctaaatccaaagggcatcagcctaatggctaaggtcagcatgaccataaaccacaaatgacatctccgaccagaaacattccaaccctaagataaacccctccccaaccagagacatgccagccctgagataacctcccctccagccggagagatgtctgcaccaagacaatctcccctttgaccacagacattccaaccctgccataaacatttcccccacaaagaaacattccaagcctgtaataagctctctcaccctaaaaccaataaatacccttagtctgtaagagagagtgctcctgaccgaaatcagccagaagcccctatcaggtctattctccaaaataagcctgtctttgttgagcttctttttgtgtttctttcgtctttctttaactcttacaccaccactcttggaaaacattgccgcctatatgcacagccctctaggggtaacgctgatccaatgagcacaaatatttcaatttttgctttggatctccaagacactgtcctaaaagtcatggcagaaccaactgtcttgaaaggcaacatgctttaatagccaggctttctgagagaggaagtaataatgggcagattttttgagcatttactgtgacctggcactgccctgagtcctttacacttagtcctctggacaactctgaggtaggtagtgttgtccccattatatggttaggacgctgaagctcagagagggaaattaacttgcccaagtcacacagcagaaccgagatttgagcccaagcagtccagttccagatcccgtgcctttgggtgatgtctgcttccaatggtttggctttgaatctcaagggtcaaaagggatggctctgactccaatcccaccccaagatgggccagggagacctgtgctgggaatggaggagaaacctagagatgaaagggtggggcccgtcctcccactgacactcatgagagtgccgggcacacagtggaggagggaatggtgggagggggttgtggtagcacctgttgaccaggctgcctgggcagcatcagggagcccagaagagaaagggagggggctccctgaaggtaggcaatgggggctacagaggaaagcaactagaagggcagacatagcagggggacattggcaaggaaaggaactaaaaattctgaagcgccagccagggcggaagatgcacccctctttccctgtgctctgggctggccaagggcctctgtcttgggggcaccagcagcccagatgaatggatctacctctacaggttcttcttccttactcagagcctcagtctttctccttaaatgcctttataaccctggtccctctcctgctcaaatacctcccatagctccctattgcccactggataaactccatagttggcctccaagagaacctgctaccagagtgtaggtctcgtgttcagccagggaggcagtcagggtgttgctctcagagatgcccccctgccctgatcccctgcctcccactgacccagcccacctctgaatcctcacagtccccaagcaccccgtgatggctctgggtgagactcaggcaaagaggacagcacagttttattcatgggattctgcaaaggtgtgggtgggtggcttgggtggggtccaaggccaagcggctatgggtcactgtgggtctgcgctcaggggcttcacccacagccaaagtccgccctctgcatacattatgacctccggcttcctgcggggctccatgtggtctggacagacacggaagcacagcagcgtgagcgccaggaccaccttcatctcagccattgcaaacgcctgcccaatgcagttcctggtgcgggggaagggactctgactgcacccaggacccgcatcccggccccatccctggccccagaccctgaatcaggcccacacaactctgagtttttacacttagtcctctggacaaccctgaggtaggtagtgttgtcaccattatatggttgggaaaataaagctcagagaggggaattaacttgcccaagtcacacagcagagctgaggcttgagcctaagcaatctgatccagatcccatgcctttggggtggtgtttgcatccagcggtctggctttgaatctcaagggtcaaaagggatggccctgaccccgaccccaccccaagataggccaaggtgggctgtgctgggaatggaggaggaacctgtaggtgaaagggtggggattcgccctccccgtgacactcttgggagagcgcctggcacacagttggggagcgagagggtggtctcaggaagcatctgttggccaggctgcctgggtagcatcaggggacccagaatagaaagggagggggttccctgaaggcaggggaagtgggtcacagagaacaccaaccaggaggggcagacagagcagtgggacatttgcaaggaagggaactaaggattccaaaagccagccagggaggggcagagaagggagctaactgtgcctgggacccccatatgggcttgcatatccccggagcctggcccagactccagccccagctgagaccagcagagggggtgggggctctgagcatatcacagactattcttggaactacccaaacctgttctatggacctttgcccataaactccagaggaggaaaggaaaggaaatctggaactgggaccatctgcaacatcctcagttttcaagccccacacccatcaccccatccctgcctcagacacaggccacccttgtctggaccctgctgagaagggaataaaagccagaggtgatctctctttgctattctctgggtcaaagcggaaggggtcatagacctggaggtgagaccaagaagggttgctgggtggggtctcccaggtatgccagccttggagagacagacagttgtgtgtgtcttggagggaggtgatgttggattctcttggtcaaaaccctgccccctcctctaggacccctaaaatggaccttaaaaaggggggtattggggaggcagcacctcagggtccagccacacagttgggttgtggtgagtctcaaaattactgaagagacagacaatgcctgtaggagagaagggggcagtcaggacaaggtccccctgcctgagaggcccctcttcctacccaggaggcacctccccatgaggctgtgggcacctttggggatgactcagccgcctgggagcacaatgtcctgggtgcagcatcgggagatgacagggactgggggatgcagccacaggctgtccttaatgtacatggtcaggaagggcagctgggccaggtcatccctaaagaaacacccagccccaatcattatcaaggtagcaaagacacaactctccagttctctgtttgcaagtgagaccttttctccctgtaacgaactccacatggaacaaatgtttgaggattagaaaaccagaaaaaaaaaatagaaagattccaaagaaaatttaaccaggtagtttaaaaagacatattttttaaaaaatcaaaatgccaactgtaaaataaaaaaaatgaatttgcataaaaataagtattctttgtgacaagagagcaaactcataatccaaatgaataagaaacaaaatatactttcaatgttttgctcatattcatcactgcactagagatactagcaaatgcaattagacaagggaaaaagagaatatgtaatttgaaatgtggggtaaatgtatcattttggaacagtgattctgagtcttttaatagagtttaaaatttgcttagatatcttaggcatattttgttaaatccactcctagatacttttgttgctatggaaaaatgtgtcaccttttatttgggttcagggaaatttatgaattcatttggaatatagagattttgtgtttcttgttaaatttaatccaggtattttatattattattattattattattattattattattattattggcatcttttctttcatgctgttttccagctggttgttatttctaccaagaaagactaatgaatacatataaattgtgtgcccaatgaacacagtacatgctaaaaatggtgtctcatatcaatagcaaaattattgatcatttaataaaagcccttgggatgactggggaacagcatggaaaaagagtaaacttaacctggttctcatgtcttataacaagataatgtccagatgaatcaagtatttaaaaaaaatttttttaaagaatcttaaaagctatagaagaaaccatgggaatattattttatacttccagattaagaaaaccttattttcacacaggtcccaggagatatacaagaagagagcaatatgtacttaaacgagaaaagggccaggcgtagtggctcaagcctgtaatcccagcactttgggaggccaaagcaggtggatcacaaggtcaggagtttgaggccaggctggccaatatggtgaaaccccatctctactaaaaatgcaaaaattagccaggtgtggtggcctgcacctatagtcccagctgcttgggaggccgaggcaggagaattgcttgaacctgggaggtggaggttgcagtgagccaagcccatgccactgcacttcagcctgggcaacagagtaagattctgtctcaaaaaaaaaagagagagagagagagaaaagatacaaagcagtccatgcagcgtatagtatgttactgtggaattttttaaagatgctaaaagtagctctggaaaaatacataaaaatataataacttagacaatctgtgtgcgtgtggaatttgggtggttttggccattggggtgagtaaactttatagattttgaaccagttaagtgcattggtattaaaaatttaaacagccacacaaaaggaagaaatgtcaagaaaaagaattcagctcccttactgggtcatcagtgtttgtaaaagttttctgatggattctcttgtttcttttaagtacagaatcagaatcactgtctgccaaaatgatacatttacccccacatttcaaattacatactcttttttccttgtctaattgcatttgctagtatctctagtgcaatgatgaatacaagcaaaacattgaatgtatattttgtttcttattcatttggattatgcgtttgctctcttgccacaaagaatacttatttttatgcaaattcattttcttttttcttacagttggcattttgattttttaaaatatgtctttttaaactacctggttaaattttctttggaacctttcaattttttttttgtggttttctaatccccagacatttgttccatgtggagttcgttacagggagactagatggatatccaatccacacactagggtagaatgtatcactgctatgtgaagtaacccattttccacatatcaatcatatatccaagtcaaccaataaaatatattcaaatcaactttaaaaatctatctgattttttgaggaagttgataaacatactctaatttttttctgaaaaataaaagatcacgaagaactaagtcaatctgaaaataaaatttaaagagagggaagtcattccacccagtattacaaactattacaggctgggcatggtagctcatgcctgtaatcacagcatttggggaggtcaaggcaggaggatcacttgagaccaggagttcaatacaagcttgggaagcaaagtgagatcccaacttgacaaaataatttttaaaaaattagccagatgtggtggtgcaggcctatagtccgagctagtcaggaggctgagatggactgcttaagcccaggtattcgaggctacagtgagctgtgattgctcaccactgcactctagcctgggcggcaaagagagaccctgtctccaaaaaagaaaaaataatgttaaaaaaacgactgcaaagtcacacgaatacaaatagtgtggcatcattgcaaaaataagaaaatagactcatgaaacagaatggagaactcagagacagacacatgaataagctaaaatgtcacatctggtaaagggagtcccctaaaactcttggagaaatggatggattttctggctgtagaagaaaaaaagtggaggaatttaacttcatagaaattcatcaaaagtatcctccaaaagttaaaaggcaatagtttgtaacaaaacagagaaaacaagattaattttaatacacatttgtaaaagtaaatatttttaaagaatccaaaaaaaaccagcaaaaaataagaaaaccacttccataaaaagaaaacaaataacttatcaacatgtgcaagagatgttcaatctcacccttaattaggaaaatgttcattaaaagtagaaatataaagattgacaaagatttaaaattcaatagtacaacactacttttggtaaagttactggaaagcctgtaccatcaaatcagctaatagaaatggactttctatcataattgaagttgtacagtgcaaatggtctttgattcttcaattccacttcacagaatttgtcctgcagaggtgtctacacttgtaagcaaaggtcactgtaaacacatgccaactgcctatggaaacctttacataagtgtccaatataggaatgagttgaataaaatgtgaaatagaaaaaaaaagctgtaagacacactgttgagtgacaaaaaccagttataaaatgtatagatacgtatatgcaaaagggaaaaagtatatagatgtatatgaatattgatgacatagataattcatagatagaagatacattgtagatgatgatgattgatagaggaaacagaggagagagagagataaacagacaattctatggctctagagacccatttggagaaagggagggaattaagtggggtagaaggattgtcaaggataacccttgtcttatctgtaatatctcatttggtgcaagaagaacttgttctcatcattgtttttgtaaattaatgctctttttccatgtggtatatatacacaatgaaatatcattcagccttaaaaacacaaaaaaatatatatcatttgccacaacatagaagaacctggaggaccttatgctaagtgaagtaagacaggcacagaaagacaaacacgcatgatcttacttatctgaaataagtaaaacttgatctaaaatagtcaagctcatagaagcagagagtagaacagtggttactggaggccagggctgaggggaagggagaggaaatggtgagatgttggttaaagggtacaagtttcagttaaagaggaataagttcagatctattggacacagcatggtgactttagttaacaacgtattgtattacctaaaaatgctttaaaaaaaatttcaaatgttcttaccacaaatatgataagtaaatggggtggtgggtgagttcagcaccttgatttaattaccatagattgtatatatatatcataatatcacactctataagtatatataaataaaatttctcaattaaaagtaaaaaacaaactcatttcccaaaacttgttaattgagaaaatttttttaaatctcacatatatatacatatatatgtatatacacatatatacatgtacgtgtatatatgtatatatgtatatacatgtatatatatacacatatatatgtatatatacatatatatacacacatatatatacatatatatatgtgtgtgtatatatatatatatgttgtttttttttcttttttttttttttgagacagagtctcattctgtcacccaggctggagtgcagtggcatcatctcaactcactgaaatctccacctcccgagttcaagcaattctcacgcctcaacttcctgaagagctgggactacaggcatgtgccaacatgcctggctaattttttctatttttagtagagacacggtttcactgtgttggccaggctggtctcgaactcctggcctaaaatgatctgcccacctcagcctcccaaagcgctgagattacaagcaggagccaccatgcctggcctcagagatatattgttaatgcgcagacctgtgtgtattttatatatttatacagaaaaggggagtgtgtgtttatataaatgtgggcatcaggatagccattttctagaagaatgcacagaaaactattgaccacagtcaacgctcgggtggagcttaataaggaagttcatttttatcataaactcttttggacactttttttaaccatgtgcataattttgcttgaaatcttggtttgatactccagaatattgatctgggcaaagattttctgtgtaacatctcaaaaatacaggcaaaaaaaaagcaaaaatagacaaatgggattatatcaagctaaaaagcttctgtacagcaaaggaaacaattaacaaagtgaaggaacaagctatagaatggcagaaattatttccaaactatccatctagcaagagattaataactagaatatataaggagttcaaacaactcaatagtaaagaaaaaaaacaacaacaaatcatataatttaaaaacggacaaaagatctgagtagacatttctcaaaagatgacatacaaatggccaacaggtagatggaaaaaatgctccatgtcactaatcgtcataagacatgcaaattaaaaccacaaggagatatcatctaacccagttaaaatgtcttttgtcaaaaagacaggcaataatagatggtggtgaggatatggagaaaggggaactctcacacactgttggtgggaatataaattagtacagccactgcagagaacagcatggaggttcctcaaaaaaactaaaactagaactaccatataacccagaaatttcactactgcctatatatccaaaagaaagaaaatcaatatattgaaaaggtgcctgcactcccatgttaattgcaacaccattcacaatagccaaaatatggaatcaagctaagtgcccatcagtgaatgaatgggtaaagaaaatgtggcatatctacacaatggaatactattcagccataaaaaggctgaaattttgttctttgcagcaacatggatggaactgaaggtcattgtggtaagaaaaataagccaagcacagaaagacaaatattgcatggtgtcactcatatgcaggagatgaaaaaaatggatcttatgaaaatagaaagtagattggtagagggaaaggggggataaggagaagttgattaataggtgcaaatgtatggtttgatagatgaaataaaaactgttcaagctgggcaaggtggctcacgcctgtaatcgtagcactttgagaggcttaggtaggcagatcacctgaggtcaggagttcgagaccagcctgaccaacatagtgaaaccctgtctctactaaaaatacaaaaattagccgggcatggtggtggcacatgcctgtagtcccagctactcaggaggttgaggcatgagaatcacttgaacctgggaagcagaagttgcagtgagctgagatcgcgccaatggacgtcagtctgggcaacaagagtaaaactccgtctcaaaaaaaaacaaaaaacaaaacagtactcaatggatcagtggggtgactatagtttgatagtttgctggtcctctccagtacaccctccacagtagccctagaaagatcttcctggtaccagatctgacctttccctcccctcctcaaacgcatcccttggctccccattgcccttgggtaaaagccaaagtcattaacattttccccaaggcttccatagccagcccctgctgccatctccagtttcatcatctcattatgaccgaatctctccctctctctctccttcgccttctctctgctcctttctctcaacccaggagatcttactgagctagagccactgttccccaactgcacccaaatatctactgaccatcattcagggtctcaactgagacactttctatacccccgagtcatgcttctcttactgtaaaacccatccctgcccatatgggctgggagtgtcctgaccagggactgctcccatgtgggcgggaagcacctggaaaataggtccctgggttgtgtccttcccaaaatctccagagcacagacaggtaatgtgaaaagaactgggggtgggaatacagtgtgggaatgtttgctgaatgaggaccgggtggatgaacaatccaggtgttctggacaataaatgaatgatttttactctgaggtctccatcatgaatccctggactggacataagtatgggaattagagaacagaagagcaaccattaaggaagtgaaaatgttcgaaaaaatatttcctggagaaaaggaagggtgtggcattcatttgcagaacgtgtgctgagtggcctcatctcctctcacttattgtcactaattctctcagcagtccagtctttcctttttaattttctttcccttattccttcaaatatttatttctctccttttatattttaatctatatctaatatacttgttatctacatgttgcatctctctctctctctctctctctctctctctctctcttattttattttatttatttatttatttattttgagacggagtctcactctgtcgcccaggctggagtgcagtgacgtgatctcggctcactgcaacctccaccccctgggttcgagcgattctcccgcctcagcctcctgagtagctgggattacaggcacctgccaccacgcccggctaaattttttgtagtttcagtagagatgggatttcactatcttggccaggctggtcttgaactcccaacctcatgacccacctgcctcaggctcccaaagtgctgggattacaggcgtgagccaccgcgcccagctgcatctctatttctatttatttcaatagtttggggggtacaggtggtacatggataagttctttagtggtgatttctgaggttttagtgcactcattacccaagcagcatacactgtacctaatatgtaatcatttctccctaaccccctctcatccttgtcattgaatcccctaagtccattatatcatccttatgccggtcagtagcataaattgaacccaatatgtagttttttgtccctcaccccctcccaccttccctcttctgagtctccagtgcccattaaaccactctgtatgcctttacatacccatagcttagctcccacttataagtgagaacatatgatatgtggttttccatccctgagttgcttcacttagaataatggcctccagctccagccaagttgctgcaaagctgtatttcattctgtttgatggctgagtggtactccatggtgtacatataccacattttctatatccactcattggttgatgggcacttaggttggtttcatatttttgcaaatacaaattgcgctgctaaaaacatgtatgtacatgtgtctttttcatatatgacttctttctggggggtagatacccagtagagggattgctggatcaagtggtagttatacttttagttctttaaggaatagtagcccaggtctttctgtcctagcagcctgcaatctttcccctgttagccaggctggccctgcctgtggtcctctgcttctattcccagtaagcaaaagtggcagaattgacaaaacaacttccccacttcccacttggggagcagagccaatgagagggcctcaggaactggccagaagaacctgcactcatcattcaatctctttaggctcgtgatccttcagaagcttttgcacctcctgccagcagtgctcctggtattctgggtgccttgcaaggtagtataggacccaggagaggccactggccgtggtgttatgacctgaggggcagcaagacaggcttgagtctctgggctgcttcagtaccagagggtggacagcgtccatgcatctaggttctcaggaggatggtggggttggggggaggatgggctgaatggagtgatgcagggttcatctcccacatccctgggatggagaggcctctgtccctactgtagtcccacactgggacactcatcctcaaacatgaaggtgtcagcttctgctcttatttcctcatcagacaactccttccaatcttcatcctggtgagaaggcaagacacacacacacacacacacacacacatacagatcacactagctctgagggatcctcagtttaaagtcagacaatctctgaagacccctccttccagaatcccaagcccaccctgcatgcctagatgtctcttgatcaccatcacgagagcccccaactcacaggcttcctccctggcctccttgtctcttcttttgtccctagtgggaggactcaatgacctatgaatattttcatatttctgcatgatgagaactttctgagaaaaagttcctggcaacctgggttacaggataattggcaatttgctttgcaagttagagattaagtattgctccaaaaatatttgctcacattctagagtgccaaatccatagactcttatcttatgtcccctggagatatttgggttgtaagtctacagactatggcatctcactaaagaggatttgtttatgctccagaacaaaatactttctcctccctgcatcccccacctgtctgtctctttctctctccctctctctttctctctcactagagcaaagaaatagaagatatgccaagactcataatgtagggcacctctcctagggtgcaaactccgttgcacataaaggtaaaaacattgcattctccttggaggaatttgatttgggaatggagagccagtgccacaatcctactctggctgctagtattgctgtgagcaataaatgggctgctctgatccaggtgtttaatgcatctgtcacaatagacatatacatagaaaggcataggcatagacacagacacatagacaaagacaagggcatggatatagatatagacaaagacataggcatggatatagatactgacaaagacatcggcatagagaaatatgtagacatagaaatagacaaaggcagacatagagaataacatagacatagacataaaaaagacataggcatagagaaagacatagacagacaatgacgaatacacagatgtaaacaaagacatcaacatagacatagtcatagacagacatagacaaagagaaagacacagatatagaaacagacacaggcacacaaatacacatagacatagacaaagactcagacacagaaaaaggcaaaaagatagagatagacacagatatacacatagatatttgcatgaacaaagctataaacatagacagagatgtaaacaaaagcatagacacagaaaagacacaaagacatagacaaatacagaccaagacaaagacatagaaaaagacacaatacagaccaagacaaagacatagaaaagacacaaagacatagacatagacataaaaaagacacaggcaaagatatagacataaacacacataaagatatagacataaacacacaaaaaggcaaagatgcagacatgggcaaagacaaagacatagtcatacagacacatagtcatactcagacacagactcagacatagacaatgacatatacaggacatagacatagatatagatgtagatgtatagataaaaatgtgacacactggcttattaatttgtaaatagagtaaaatatcagacttgtcagtttcacacctagaggtcccctgctatttgtgtctcactcagtcatctctaaaaactatctctgacctgtccctcccctgctcaagcaatttccaatgctccccagtgccctctggatcacatccaagttctttgatctgacatttgacatgaagctcccttctactttttgcattcagatcccagagaaccccaccttgctcagcaggagtacatcagtgaagtccaaagtcttggacttggcctttacttcgtggaaataatcaacaccctggctagtaagggtgtggcgctgctcctggatgatagcttctgtgaagtcatgaaccaggcagcaggccctgcggaagcgccatccgctggggatgagataatacagaaagtccatgcacagatgaaggtaaggaagttgttgagaactggaataaaggtgattcttgctatgctttagcaaagagattgacagcactttgcttctgccctgccctgccaccagggaactgagctccaagatggtggcaatatattgactgggctttctgcaggataagggcagaaagggaggcaacaacttaacacacctgaagccacaggagcatctcccaccagcatccaggagctacctcctataggaagcacagtatccaaaaacagatgcccccacagttacagagtgaggatcacccatgagattcactctccaaactctcttatctccctgatttccatctctaggagcttcctccatgcccctgggcactcagaccacaacttgaacatcatgctcttattcgctctcccctgcccccattatagagttctgtcccttctccttcctgaaactatccacaaagctcagaattcctgctcttccagctggtccgaagtccatgccccaccctagtatccttgcatccaatgtcaactccatgcaacatctacattacagttattcccccacagagctcagctctgaccatgcccatcagctcaaaccccttcaagggctccctagaaacctcatgataacatttataccagtcatttagactatgacataactcctccaggcacttctggttgtcccgatgaggtaggcacttctggttgccggaccccaacctacttctttggattcatggctcaagttctcagtccctgggcaaagactcactcctgacaatggctgtcaaagctgaagacacatttctgcacactgtccaaggtcatgaggctggtgtgctcaaacatgtccagatgggcactgccccctgaggccaggagctgccacttggcctagccagagaaggggacacagctggggctggtccctagctcctttgagtccttccccaagcccaaccatcaagatggacttccccaaagccaacctctttgtcttctccccaggaacccctccccaaggaggaccaggttgtgctgggaacaacaactgttactattaagagacaaagacccaagacgggggttcaggagaacttggattcatgttccacccttgcatgcccttggtcaatgcattaacctcccttcccctgtcaaatcttcaggaacagttgagatgatgtaccttggtgccacataaacaaggttagaaatcctgctccactattccaacctcgattattagctaggtaaacttgggcaagctccctaatctcttagacccactgtttcatcatctacactgaggcagaaataatctctcattcacagagttgttaaaagtaaattagtcaatatatacttgttatcaatgagtgggaacatggcattgtttctggccaatagggggcatactcaacaaatgttggatttcctcacctgcattgttataaattgattacaagaatttattacactatccctatgttgggagaggtagtcctccatgtgccctgagtatcctttctgggtatgccaagaatgtaagacactgatattcttaactggagccatttctgagagttgtgtttgcagagaacagccttgagggatgaggtaatgactcccttttgacacttatcaggcttgctataaaagcagatctcctaagcctactgctccatccctgtaatgcaatatactatgtcagcaagcatcagtagaagcccacctgtgttgccccatgggatttgggtggcttggagaaaaaagcaaaccaacaagaaacacatgctccttgctgtgctatgagtaataaatcatgctttgtctcttacccacaaatctctgtcttctggcagaatccatgaaaccataacaagataacttatcaatttgcaatttttaaaaaaattctagagatgtcacgaagcccttgcccaaattcttcatttgccccccatatccataccctttgaaatgtgattttttcagtgacttccattaagagaccgagcattttttactacccaccactttttgattctctgttggacttttggctttctctgacaaaacacaatgtgaaattgatgaggtaataactaatgaatctaacctgcctcgtctcactccctggaaccctctctgccatgtgaaccatggggtgccttctggagggatagaatccctggaggaaagtccaggagtcccagctgaggacatctgtgtcaatttgaaaccagacaaaacccaaacgtttgagagaactgagccaagaccagcaaggctgcctacctgacccacagcttctcatgtgccatgaatatctcttgcacatccagaagaacccactgatatggtttggctgtgtccccacccaaacttgaattatagttcccataatccctatttgtcttgggagacacctggtgggaggcaatttaatcctggtggtgattaccttcatggtgttctcatggtagtgagggagttcttacaagatctgatggttttataaagggcttttcccccttttgctcagcccttcctcttgctgctgccatgtgaagaaggacgtgtttgcttccccttccaccatgattgtaagtttcctgaggcctttccagccctgcagaactgtgagtcaattgaacctctttcttttataaattacctagtcttggatatgtctttattagcagcatgagaatggactaatatagtaaattggtagagtgaggtgctgctgttaacatacccaaaaatgtggaagtgactttgaaactgggtaacaggcagaggttggaacagtttggagggctcagaagacaggaaaatgtggaaaagtttggaacttcctagagacttgttgaatggctttgaccaaaatgctgatagtgatatggacaatgaagtccaggctaaggtggtctcagatggaggtgaggaagttgttgagaactggaataaaggtgattcttgctatgctttagcaaagagattgacagcactttgcttctgccctagagatctgtgaaactttgaacttgagaaagatgatttagggtatctggcagaagaaatttctaagcatcaaagcattcaagaggaagcagagaaaaaaagtttgaaaaattttcagcctgatgatgcaatagaaaagaaaaacccattttctggggagaaattcgagcctgctgcagaaattcacagaagtaacaaggagccaaatgttaatcaccaagacaatggggaaaattactccagggcatgtcagagaccttagtggcagcccctcccatcacaggcccagagtcctaggaggaaaaaatggttacttgggccaggcccagggcccctttgctgtgtgcaacctaaggacttggtgtcctgcatcccagctgctccagccatggcaagtggccaaggtacatgacttcagcggatgcaagtcccaagctttggcagcttccacgtggcgttgagcctgtgggtgcacagaagtcaagaattgaggtttaggaacctcggcctagatttcagaggatgtacggaaatgcctgatattcaggcagaagtttgctgcaagcgtgaggccctcatggagaacctctggtagggctatatggaagggaaacgtggggtgcaagcccccacacgtagtccctattggggcactgcctagtggagctgtgagaagagggccactcaatatcccaaaatggtagatccactgacagcttgcactgtgcacctggaaaagcaactgacactcaacaccagcttgtgaaagcagctagaagggggcttgtaccctgcaaagccacaggagtggagctgcccaaggtcatgggagcccacctcttgtatcagcatgaactgaatgtgagacatggagtcgaaggagttcattttggaactttaaggtttaatgactcccctactgcattttggacttacatggggctagtagcccttttgttttggacaagttctcccatttggaatggtgtatttaccaaatgtctgtacccccattgtatctaggaagtaactaacttgtttttgattctacaggctcataggaggaaaggaattgcctcatctcagatgaaactttacactgtggacttttgagttaatgctgagatgaattaagactttgagggactgtttggaaggtgtgattggtgttgaagtgtgaggacatgagatttaggagggggcagggatagaagatgtggtttggctgtgtccccacccaaatctcatattcatttgtagctcccataattcccaagtgtcatggaagggaccaagtggaagataattgaatcatgggggtgagtatttcccatgatgttctcatgatagtgaataagcctctcaagatctgatggttttataaagggggagttcccctgcatacactctcttgcctgccaccatgtaagacatgactttgcttctcattcaccttccaccatgatagtgaggcctccccatccatgtggaactgtgagtcaattaaacctctttcctttttaaagtactcagtctcaggtatgtctttatcagcagcatgagaacagactaatataccagccacctgtctcatagacttgttagcaatcataaaaccttattgttttaaaccaatgagttctcaagttgtttcttactcagcaacagctactatacaattgtcatcatgaccctcttgagtttacaagaggaaatatagaaacagacactttctgggcacctactatgcaccagggatatgactccattacatcaccttgaccatcttttaagtagggattattatacccattttacagctgaggaaaccaaagctcagagaggaaaagcaatgctgaatgccacccagcagagccaaaattccagaccagatctgtctgtggtgcctccaccccaaggcttcagctggaactctgggttcaaagaattcacgtgcatgatattcacactgtcagtgaaaaacttcatatagggcttcagcatgttgaaatggaaggcgggcatcagcatctgacggtggcagctccacttgtcactggcatttaccaggagcccatcccctagtagaggcagtcaagggccatgggcaagggtatctccctcttcttacccatcccccaaggtttttcccacccttgttcacctacaggtactcacccagccagggcttcaggaacttgtagaaggcctcgtcttttggtgcaatggtggctgacatgaatgaggaccatcagaaaccatggaaagggtgagggagggactttgggtgtggggtgaggctccaagccagagaccacacttactccctcaaagcgcagcatagtagaaacatgtgacatggccccgatatgtgttaacatgtcctgacatggtcacaaaatacacaacaagccctagcatgctatgctgtgctctaacaaggatcttagacactctgaaatgaccttagcatgccctataggcaggccccagttaggattcagatttaaatatggtccctttaatatcccagaaatagcccatgtctggtcccaaatgttccatagtcatgactcaaatataccctgaagcctgtctcaaacaatactcaaacaatgtctcagaatgtttacacacagaccctgggttccagacatgaggcacatccctgggatcatatggagatggttatgtctagggctcagctgtggccaagagtatttggggtatgtggggtttgtctgcgattctgtttgagatagtctttttcttctgctggtgacgtctgggccatgtttgggatgcgcctcacgtttgggcaagggtagggctccaggctcgggtggcgtctcctactggagattcctagggcctggagcaggagggcaatgagcatatagtggaagaaccacaggatggggtagaaggaaccgacccacagaggtgaatgtcatgaaaatagcagtccagatcctccaccaactgcatgtcctcctcattgttctgggcttggggacatgcaaggtgatgccaggcctggcaggaggtcttgaattctaatgttgcccattgcatcgcttcatcccccactttaaaacattcctactcattgttagaaacccagctccagcaacttctcttccaggaagccttccagcctgccccaggagagaccaggttctcctctgggctctcccagcccatctccttctggaccactcctgaccccatgactttggggatgtctctgcccagatccatctcctcaagcttgggagatccttccaggacagagccttgggttgaggcctcatggggctccagtagtgcacagaacgccggggtggtggggggatggcagtagtgggaggagacgctgagatgggggttggtgaatacatgaaggaaagagaagatggctgagggtgaagcaagaaggaagggcctggatactgcagcggccacacagaagcttgggggaggaggggcttgcaggcctcagatgcaccacggcattcaccaccaggtgtttcagatggtacctgaggcattgatgacagaccagatgatgttggggtggcacaacctgatgatgggagtaatggggttcatccagatcttaaagccctgggggtaagtggccaccagctgagtcagaactctcatgccctccttcatgtggggacctgcaagcaaggcaggggcctgtaatcccagctactcgggatgctgagacacaagaatctcttgaacccaggaggcggaggttgcagtgagccgagatcacgctactgcactccagcctgggcaacacagcaagactccgtctcaaaaaaaaaaaaaaaagaaaagaaaaggaggccatcctagcaccatgcatggagtccagttctttggataagtatgccactgggcaatgttatgaccctataacttgagtcagaactcctatagccatttctttttgttcatgaacatatagaaagaaaggcttagttatgtctggtagtcctaaagctggggcccaagttaaagcttccttgatctgttcaaatgctatttcttgattagtcttcgaaaggaggggctgtttttctcctatctttgtggcttcatataatggtttagccattaatgaaaaatttggaatccaaatatggcaaaatcctgctgcctctaaaaattatcgtatttgacaccgggtggttggggttgggagtgcacaaatggcctgcttctgtttatagccaagctggtgttctctgtggcttactatgaaacttagatatttaactttttcatggcaaatttgggctttctttttagatactttgtaacttgttttccataaaagatggaggaggtcctgggttccttggtaataatcctctcgggttggggctgccaaaagaaggtcgtccacgtactgaaacaaggcacagttatcatttggcagggtataggccttgaggtttgaggccagtgcttcctcaaagattgtaagagagtttttgaacccttgtgggagcttagtccaggtgagctgtgtagcttccttgtcctattgaaatgcaaaaatgggctgactaactggtgccagtcagatacagaagaaggcatcttttaagtctaagaccgtaaaccaagtggcaacttgctggaataagtcccattaaagtatataggtttggtactactaggtggatagccactgtggccctgtttctagcccgcaagtcttgcactggtctatacacattagaccctggtcctggtgtcggctttcatgctggcaaaagtggagtattccggggagactggcatcggactaagatcctgtgtttatagagccagtctaaatgcttacaaatgcctcaaatagcctctcaggggaccgggtactgacgaactcgaaccagagttgctcctggtttcagtttaactactactggtggatgatttacagccagcctaggtgggttatcttcagcctataccttaggaattttattaactagtccaaataataatttttcttctttccgtgtatgaagctgcactggcgcctgcagtttctttctatgaagtctccattcctcagcctgtggaatggtaagggttaacactatggcttttgggtgagtcagattgaaagtcatatctttttgaagcctaaaagtaatctgtgcctgcagtttttgaagtaggtctcttcttaacaagggaactggacaagttgggaggtataggaattcatgctagacttctcgtcttcctataacacacctccttgactgactaaatggcctcttctctgagactccagcagctcctgcaatagttgtatagttcttggatagtggccctatgggtcaagttactacagagtgttcagcctcagcatctacaataaagttcatcaattggcctccaacttttaatgtgaccacaggcccctggaggcctaatgagaaggagcctggtctgtcctaatcctcacatccttcagctcctgtcagcccaatcaggtcagtatctggttcctctaaggcaccgcagcccttggccgatggcctctttgtctcacggccttggccatttctttcattgccttctggacattcatccttttagtgtcctttctttttgcatctctcatattgatccctctctagctttcaaatttggtcggctttcaaatctttgtctaacttaacctcttccatgtccacgtccacgtccgtgtcctctcacattgctaatctctttttctataaggcctgctgccaacagatctgccttttttttaagccttcaatctgcttccttgttttcctcctggtcatagttaacatacactttggtggctacttctataagctgggtggcgttcacgcctgcaaaaccttctaactgatgaagctttcatttgatgttaccatgggcctgtcctacaaatgatgtattcaccatacgctgattttcagtggcctcagggtcaaacagggtgaaaagttggtatgcctcacagagtctctcataaaactgacttgggctctcatcagctccctgaagcacttctgaaatcttccctgtattaattgctttctttccaccctcccttagcccttgcagaagtgcctcttggtacctctgcaaacgctgaagctgagttgcatcctctgggtcccagttgggatcttggtctgggagctggccctgagcatatgcctgagcgttcactgcatctgctggtgcaggggcttctagtcagtggagagctccctgtgttactcttctgtgctcctcagtgttaaacagcgtgagaagaagctgcctacagtctggccaggttggattgtgtgtcagaaagatggattgcatcagatctatgagagcttggggcttctctgtgtagggggggtatggtgtttccagtttaagagatcagtggttgaaaagggctggtagatgcaagttcattgccccccgccggacttggacttggtcattataataaatgggtcctcgcgtctccctgagaggcatttgcatagctcgagcatggccagatttgagttggtctgcttgactatcttgacttccttccctggccccccgaggctccgatccttcccttcagggtgagacttggggcatgctgtcttttgagtctggctcctggggagctggagctatcagcccctgtaaagcgaggtaggctgggacatatggaggaagaatctctgttccctctggtggcccctgcaaaactggcctctcttgctctctctgggactttccctttaactctgtgtctgccagtgaagctgctcttactttcacttttgggttggctcaggctacaagtgttttgcaataaggtgctaaacggggctggatccaggctggtcttgtctgtgctatatttaaccatgaatcaatacaaggaaattggtctggatgccctggctgtcctccgacccctgtcaccaccctaaatacacgaccaattatttccttgtctatagttccttcagtcggccatctaacaccaaaagaaggccattctaattctcagagagttctcaacctctggggggttaacttaattccataatcccctgcaaaatctttcttaaagttctgtaacatgcattccaatggagtaagttttgatgactttcctcccattcctccctttacagcgcagcacactcactcttgcacactcactcttcctcttgtttcggctgaatataccatctcctattacaggagttttcagatgctgcttggcttcggagagttccttattcctgctacaactgctgcagtcgtagggcagctcctattagccatatgcagatcaccgctagtcttagtcggccccacactttgctcagaacacacagtccaggctaagagatctgtgactccccactttgcaactgatgaacctaattaggcccctccattcacacactttcacacacttccccactcccagttcccatgttcttaattggggtggtgagccactctcactacctccagtttccttttcctaaccaacttagtgagccactcttgcatcctatgtcagttggggtgtaagtttcatctgaattggcgagccattctcaccacccccagcccttctgggttggattaatagtcacatcccaggaggtgatcaggctccccttccatccttatggggtgggtcctgccttgggccccaaaaccttactgcagtcctgaaggaagcacgctgctcctggaatcatcccatagcccctcaggttccactgtgctgctgggtaggggcaccaggtcatgagagacccgatctcccctccgggctgaagttctctgggcagtgcctggggtcacaggtctcccctggcccagggctcctccagcccccacaggcaaaggagacagtaagcctgttgtctccactcctggctggctcttcagaaatgttgtgggaaactgaggaacagagaccgatatgggagaacaggaggatatttattttaaggtatgcaccagttcagtggattcacatccaaaaagctgagcgttggacaaaaacaaaagttaacttatataggctagcatacaagagcaaaacaaagacaataaattttacagtgacaagccacataatctatagtgtaactgctaacttggcataacttgtggccttgtatatgcagcgcatcagaaaaaaattaaaacaggaactttgcaaatcttactaaatacaagcattggcaaacatagtcataactaatagttcagtacaggagagacattgaaggaatttgttgttcttttaacctttctcaggagtgtctgcagctcatttctgcaggccaggtcgccatgacctgtctatagccttgcctgcagcagaggaaaacttgtgtttttcaaataacccttatttcttctggagtgaataaatgcagtgtttatttttctttaatttctgccttaacactgcccaaagcaatttatagattcaatgctattcctattaaactaccagtgagattatttacagaactagaaaaaaaacagttttaaaattcctatagaaccaaaagtgagcttgaatagctaaggcagtcctaagcaaaaaaggtaaagctagagacatcatgttacctgacttcaaactgtactacagggctacagtagccaaaacagcatggtactggtacaaaaacagacacatagaccaatggaacagaatagagagcccagaaataaggctgcacacctacaaccatctgatctttgacaaatctgacacacaaaaaaactaacaatggaaaaaggattccctattcagtagatggtgctgggataactggctagccatacgcagaagattgaaactgaatcccttccttataccacatacaaaagttaactcaaaatggattaaagacttaaatgaaaaacccaaaactatgaaaactctggaagacaacctaggcaataccattcaggacatagacatggtcaaatatttcatgacaaagaagccaaaagcaactgcaacaaaagcaaaaattgacacatgggatctaattaaactaaaaagcttttaaacagcaaaggaaactatcaacagagtgaacagacaacctacagaatgggaaaaaattttgctaactgtgcatctgacaaaggtctaatatctagaatctataagaaacttaaacaaatgtacaacagaaaaataaacaactccattaaaaagtgggcaaaggacatgaacagacacttttcaaaagcaggcatacatgcagccaacaagcatataatagaaagctcaacatcgctgatcattagagaaatgcttatcaaaaccacaatgagataccgtctaacaccaatcagaatggctgttaaaaacgtcaaaaaaaaaaaaaaacatgctgatgaggttgcagagaaaaaggtacactgatacgttgttgttgggagtgtaaattagctcaatcagtgtggaaagcagtgtggttatccctcaaggagctaaaaacagaaccaccatttgacccagcaatcccattactgggtatatacccaaaggaatagaaattgttctatttttaaaagacacatgcacacctctgttcactgcaacactattcacaatagcaaagatatggaatcaacctaaatgcccgtcaatgatacactggataaagaaactgtagtacatatacaccatggaatactatgcagccataaaaaagaacgagattatgtcctttacaggtgtgagccaccgtgcccagcctaaccaaaggctcttttctgagccatcattttccctggcaggcagtggaactgagcagatgggccagtggccatagtgctgctgccttgtgtgggacccaccaattggactggcagaccagtgggttactggtccccatgcaggcccctcgcaccatgacagccgagcccacccaagctgagggatgctggagagatatccattcaccctggccaggcacattggctcacgcctgtaatcccagcactttggaaggccaaggcaggtggatcaccagaggtcaggagtttgagaccagcctggccaacatggtgaaaccccgtctctactgaaaatagaaaaatttgctggttgtggtggtgggtgcctataatcccagctactcaagaggctgaggcagtagaattgcttgaacccgggaggcggaggttgcagtgagccgagattgcaccactgcactccagcctgggcaacaagagcgaaactccatcttgaaaaaaaaaaaaaaaagatattcattcacccacccaggcagagcagtcaataccatttctcctctggtggatgagggatgtcccttctgccctcacccccgcagtcttgggagaactataggataacataagagcctttggccaggtgatcccccagtagtagctcgttatatgagtgccccaaagcacgtccttgtcaccccttcctgcagtcctttcccttctgactccattttatgtctccgccagtcattttattttcagccctaaaatatgtgcagtgttacatttgcttttaactttctgttaactctccatgggcaattgactactgtgggacacttggttgtgagcggtcttccgttgtgttgactctgggacatcagaaccagagttgttctgtgtccccaacttgggttcacttttggccacccctggggtgccccagggtttttggcattggtgaggggaccctcgttgactgaaacttgggcacttctgagtcttcagctttgttatgttggccaccccctggatgctctggggttttcaacattgacattccctgtaggattatggattatagccctccctctaagggaacattggtcatgtctttttctgccctaaagttagtaccatcttcctggccaagcacagtgactctctcctgtaatcccagcactttgcgaggccaagatgggtagattgcttgaggtcaggcgttcaagaccagcctggccaacatagtgaaaccccatctctactaaaaatacaaaatttagccaggcgtggtggcaggcgcctgtaatcccagctatttgggaggctaaggcacgaggatcgcttaaacccgggaggcagaggttgcaatgagtcaagattgtgccactgcactccagcctgggggacagagcgagactctgcctcaaaaaaaaaaaaaaaaaaaaaaaaagaagcactattttcctaatagccagttgctagccctttcctgtgtactgtcttaccaattgccttgctcgagcccctcttggtcaaaggaattgggagttcccaggcccctggcctgacagacagccacctacagcaatagacaagtggccacattaattttttttttttttttggcgtcttcactactacgtaagttctctggcaagtcaaggaccgtaaggtctccctttgtgcaatgtttacccttcccttcctcgcttacacagtcactatttggttggcccccctctctgggtaatgctcattttctgtggaatttaggcttaacatccaactgcccatttgaagctcataatccacttttgtaacattttgctatctatataaagtgggaaattaaatgggataagtgggctgggtatggtggctcacacctgtaatcccaacacttggggaggccaaggcaggtggatcacttgagcccaggagttcgagaccagcctgggcaacatagtgagaccctgtctctacaaaaagtacaaaaatgagccaggtacgatggcgcacgccggtagtcccagctacttgggaggctgaggcaggagaattgcttgagcctgggaggcagaggttgcagtaagctaagatcaagccactgcactccagcctgggggacagagtaagaccctgtctcaaaaaaaaaaaaaaaggaaaagaagtaaaagggaaaagtgaaaaggcatttgctaaacttaggctaactgaaaccccttgtagtgatctttactaaacataaggacatcaccaagcatcccaaggaacttgccactaggatgtctttcaggcaattggaataagttcaaattattgggcaagttgaaaaagaaaaaaatcatttactattgcaatatgtttgggttcaattcaagttggcaaaccaacagatttggcctaggcatggttctttacattataatggttgtataattagatttgttgtttcgcttttttgtttttgagatggagtctagctctgtcgcccaggctggagtgcaggagcgcgatctcagctcactgcagcctctgcctcccgggttcaagtgattctcctgcctcagtctcccaagtagctgggattacaggcgtgcagcaccacacccagctaatttttgtatttttattagagatgggatttcaccacgttggccaggctggtctccaactcctgacctcaagtgatccgcctgctttggtctcccaaagtgctgggattacaggcatgagccaccatgccgggctaaattcccctttatatatacatctatcctattagttctgtccctctagagaaccctgataatacaccaggccataccatttatcatgtgggaggggatgtggttccagatctagaccccagtaggattatcagagaaaatctcaagatctcaaacacagaaaccatatgctaatttgtttaatacatggtaggaaaaagtgtgcagttaagccagttttttatgataagatgggagaaataactcaggagaaagttgaaaatcccgttctatttcagggctgtttcattgaggcactcaggaaatatactataagatctacttctgtttggatctcttatgtctatatgttaatatgtgtcatgtggaaatacgatttcactatcaatcatataaaagagctctcattagttggtttaaagaaaggttggttcaagccgggtgcggtggctcatgcctgtaatcccagcacttgggaggccaagcgggtggatcacgaggtcaagaaatcgagagcatcctggccaacatggtgaaaccctgtctctactaaaaatacaaaaattagctgggcatggtggtgcgtgcctgtcatcccagctactcgggaggctgaggcaggagagtcacttgaccccgggaggcagaggttgcagtgagccgagatcgcaccactgcactccagcctgggtgacagagtgagactccatctcaaaaaaaaaaaaaaaggtggttctttaagcaaggctgggttaagaataaataaataataaaaattttaaagtaaacaagaaaaaaaaagttggctgtacatggtggctcacgcctgtaatcccagcactttgagaggctgaggcagaaggatggcttgagcccaggagtttgagacgagcctgggcaacatggcaagactctgtctctacaaaaaaaaaaaaaaagaagaaaagctggctgagcatggtggctcatacttgtaatctcagcattttgggagaccaaagtgggaagatggcttgaactcagatggtcaaggctgcagtaagccatgatcacaccattgcactccagcttaggtgacagagtgagaccttgtctcaaaaaaaaaaaaaaatagaaaagtaaatgtttatcagactagtaaaagctagctcagaggctttccagttcacacgactttagtaatctttggtaagattaacttggtaaatttagtctcaaaattattttgaggaatttaaaatctttaaatcatgttatgttaagtaatcctagggttttcgctgggaattagggttctaagagttagaatagtaggagagtaagatgtgtttttggtgacgtttataaaaaacatgacgatgtcttttttgcttaagaaaatacaattttttctaatttaaaggacctttctactggcattgagattaaaaccactgtatctaaccatttgcgtgtgtgtgtgaagtggtaagtttctatttgatattaatggctagagttctaaagtaaaagctatatgatcttttttttttttttgcgtctcactccagcccaggctggagtgcaatggcgcgatctcggctcactgcaacctctgcctcccaggttcaagcgattctcttgcctcagcctcctgggtaggtgggattacaggcgcccaccaccaagcccagctaattttttttttttgtatttttagtagagatggggtttcaccatgttggccaggctcgtcgcaaactcctgacctcaagtgatctgcctccctcagcctcccagactgttgggattacaggcatgagccgctgcgtccagtctataatatctttatttgtgtacgtgtgtgtgtgcacacacacgcactcatgtttagatgtgtttatgtgtatttacacgtgttttgctattgtggccacaagataccaatttggctttaaaataaaagaatacctataaattaagtaaataaacccaaatacttttccagttcatgtgacttaagtaaatctttaataaataagctggatttaaaattactggtaaaataaaattagaaatgtcttcagaattgtcaacataagttattgtttagatgtattggtcaagcagttttatatttatctctgctaaatatcataagatgtcaagatttggcgtgagggttatcaagctataaatgcagcccagaagagaattatcttggccgagtgcaggggctcacgccgctaatcccaacactttgggaggccaaggcaggcagatcatctgaggtcaggagttcaagaccagtctggctaacatggcaaaacccacctctactaaaaatataaaaaaaaattagctgggcatggtagtgggcacctgtaatcccagctactctggaggctgaagccggagaatcacttgaacctgggagacggaggtttcagtgagccaagatcacacccctgcactccaatctgggcgacacagcgagacccgtctcaaaaataaaaaaataaataaaatgcactaacacaccaacctgggcaaagtggcaaaatcctgtctctacaaaaaatacaaaacttagccaagcttggtggtgcacacctgtagtcccagctactcaggagactgaggtaggaggatcacttgagcccaggagttagaagctgcagtgagctgagttggcaccactgcactctagactggggaacagagactgtttctcaaaaaaaaaaaaaaaaaaaccctaaagaattggttagaacgagtaaattttcttacagtattgatttactcttaataaaattataaaaagttttaatttttaacccaaaagttcaacttttattgcatctcttgctgtattcagctttctctccccttcaagaagttctgagatagtaactgtctctttcaacttttcatcggcctctgtaactgtttttcatcacattctaactgatgtggcctgatgtcagaaatgttttgtcttaaagtctaaaggaaatgttttcatctaatataacattcttgtgctcttggctttaaattcgtctatgaaattaaaaactcacttatgactcgggacacactctgtgtctaaatcagtacaattttcattagatttgacttgcagcttatctaaatggactccccatggagaaaagcaatcacactgcagacggtcttttttttttttttttttttttttttttgagatggagtcttgctctgtcgcccaggctggagtgcagtggcgtgatctcagctcactgcaagccctgcctcccgggttcacgccattatcctgtctcagcctctcgagtagctgggactacaggcgcccgccatctcaccccgctaatttttttgtatttttagtagagacggggtttcaccgtgttagtcaggatggtctcgatctcctgacctcgtgatccacctacctcggcctcccaaagtgctgggattacaggcatgagccactgcgcccggccaaaaggtctttttttttttttttttgccttttggtaactgatgtaacaagcaaatgtttcatcttatcaaaataattcctatgttattgttattattgattttcctaagaaaactgagattgtaaaaaattaagattatgacattaatgtaactttcggcattacttttaaagtccttgtgctcttaagttacaggactttgactcctgggtctaaaaaggacaccaagacctgcaaaattttaaacactgacagcagttaaagcctcatttttggaccctagagaagattacaatcaaaataaactgtgttcgtgagacacaaggccagaaattaaaactattattattgaacccctctagacccagggactatcatggaaaaggtgagcatgcaagattgtaagggccaattttgagagatgaaattagttcagagtttctctataacttaaacattaatgttaaaggcacactgaagcaagaccagcatctggcttatataaattatatcttatggtcaagatgattgaagcttgtttataagattgagaaactggccccataccttgtcccttattagggcttattatttaggaaagtaagtctcctctctcaaaaaataataatttaaggtctttgcatttttttgaagtgtctgagttactactttggctaaatgaatgactttagacaatcacctatgatcctattttgtgatattaagtgtcatagactttcgatatttgactaactttccaaaatcaacttctaaattcagtctttgtgacctcattattttttatattagatctcctgaagtccatgagagacatatttgactaatttagtacaataaaatcatactacatgaagtagcgctgtcagtttgggagtgaatgaagggggacggatgcagaaataaagacaaagacaaaaagatctgttttgaaagaaggatcagggggctcctcgcttctagtgagcaaaggccctgagcttctacagcccttcgtatttaatagatggaaagagcaggaagggagaggtaatggttggtcagctgcttgatttatcacagggacacgtatatctataacagccacaggtgcttctgtgacccacattttccctggcgggtcctcacactggctcaataaacttggatgatttgagactttgccttggtcattcacttttgtggtccatgggggcctggtcatcaaaagcccagtcaatgggacatagtcattgcgggccttgtctgtggtgacctggtcagccagagtcttgtcagtgagggggaagcccggtcagcaggatctaagtcagtggggttttgctcggtgaggaattggtcactggggtctgctcagtatgggccttatctgtaaaaatctagtcagtgggccaggcacggtggctcatgcctgtaattccaacactttgggaggccaaggtggatagatcacctgaggtcaggagtttgacaccagtctggccaacatggtgaaaccccacctctactaagaatgcaaaaattagccagttatggtggaatatgcctgtaattccagcactttgggaggccgaggtgggtagatcacctgaggtcaggagtttgacaccagtctggccaacatggtgaaaccccacctctactaagaatacaaaaaatagccaggcgtggtggcatgtgcctgtcgtcccagctactcgggaggctgaggcaggagaatcacttgaacctaatcaggaagtggaggttgcagtgagccaagatcacaccactgtactccaacatgggtgacagaggcagcctccatctcaaaaacaaacaacaaaaaacctagtcagtgggggtgtagggagtggtattttgttcagtaggggcctggtcactgggggtctggtcagcgggatctgaaaagtagagcctcgttagtaggggttgggcggttagcacctggtcagtggaaacctcgtcattgtggtctagtcagctgaggcctggcggtgtggtcctgctcagtcagcgaaggtctcaccattggaagcatgtcagtgtggcctagtcagcagatcccggtccatgggatttggttatttgggacctggtcaatggggacgtgttctgtggggaccatgtcagcagagacctggttgtcaggggtgtggtcagctaatgcggtgccaccgaaggactccccagtggggcctactcagtggggccctggtcagtggaggcctggttgtaaggggcactgttggcagtgaccttgtcattgagctcctggccagttgggaccagtcagtggtttgggtcagtggggcctggtctgtggggccatgtcatgtggtctggtcagtggggccctggcagtgtgggcctggtcatcagaagcctagtcagtgggggggcctactcacgggggtgttggtcagtgaggacatggtcattgtggtcggcttaacgggatccattcaatgagggtcaggtcatggaaaatctggtcagtggggtttgatcagcaggggactgctcagtggggatcggaccagtggggcctggtcagcaggcggccggcagttcctggggcctggtcagtggggtccagcagttgggacctggttgattggagggtccagccctacgggacttagcgggtgttctccccgtgtgcagagacgagagagcgtaagaaataaagacacaagaccaagagataaagagaaaacagctgggcccgagggaccactaccatcaagacgcggagaccagtagtggccctgaatggctgggcacactgatatttattgcatacaagacaaggggcgtagggtcaggagggtgaatcttctaagtgattgacaaggtgaagcaagtcacgtgatcacagcacagggggcccttccctcttaggtagccgaagcagagagagagaaggcagcatacgtcagcgttttcttctatgcacttacaagaaagatcaaagactgtaagactttcactattccttctaccgctatctactacaaatttcaaagaggaaccaggagtacgggaggaacatgaaagtgaccattggagcacagcaccacaaggaggggtttaggcctccggatgactgcggcaggcctagataatatccagccttccacaagaagctggtggagcagtgttccctgactcctccaaggaaaggagactccctttcgcagtctgctaagtaacgggcgccttcccagacactggcgttaccgcttgaccaaggagccctcaagctgcccttatgcacgcgttgacagagggctcacctcttgccttctaggtcacttctaacaatgtcccttcagcacctgaccctctacccgccagttattcctaggttatgttagtaacgcaacaaagagtaatattaaaagctaatgattaataatgtttataataatgattgataattgtccatgatcatctctatatctaatttgtattatgactattcttattctaactattttctttattatactgaaacagtttgtgtcttcagtctctcacctcggcacctgggtaatcctccgcccacagtcaataggggtctgcagctggggcaaggtcagcggggatctgatcagtgagacctagtcaggtctcactgactgactaggccctgggggttggggcctggccagcaagagtccagtagttggggcgtgtttggcgagggtctcatggttggggtctggccagcgggggtcccacagttggggcctggtgagcagagatctggcagttgcagcctcgtccatgggggtctggcagttggggcctggtcagcggggtcttatagttggggcctgtttggagggggtccagcagttggggcctggtcagaggggatacggcagctgggggttatttggcagggatgcagcagctgggacctggtaggtggggtctggcggttggggcctggtcagtgaggatcagatcagtgcggtctaggcagtgaggtctggacgctgggccttcatctgcatgggtctcgcagttgggacctggtcagcaggggtctaccagttggggcctggttggcggaatcaggcagttgggacctggttgtcgggggtccaacagttggggcctggtcaaaggggatccagcagttggaacctggtcagcagggctctggcagttggggcctggtcattggggtctggcagttggggcctggtcaacaggggtccaggagctgaggcctggttggtgggccgtctagcagttgaggcctggtcatctgggcccggcatttggggcctgatcggcggggatcagagcagtgaggcctagtcagtgaggtgtggatgtgggggcctggtaagcaggggcccagcagttggggtctggtcagcaggggtctcataagaagaggcctggttggcaagggtctggcagttggggctcagtcaggaggggtctaggagttggggcccagtcagtggggtctggcagtttgggcttgatcagtgcagtccagcagttgttggggcctggtcagtgggggtccagtagctgggacatggtcagtggagtccagcgtccggggcctggttggcaggggtctgacagttggcgcctggttggtggggatcccatagttggggcctgtcagcagggatccagcatttggggcccagtcagtggggttcagcttttggggcctggtgagtggggttcagcatttggggcctggccagcaggggtccagcagttgttagggcctggtcagcgggggtctgattagtgagatctatttggtggggtccatcagttgggacctagtcagtgagggccgtgagggccttgtcagttgcagccttgttattgtggcctttgtcagtggtgtctgatgagccagggcctggtctgtggggcccagtcagcaggacctggtcagtccacatctggtcagtgggacctggtcattgtgggggtggtcagctaggacctgttcagtgggagcttaaccattggaagcctggccagtgggatcctgggtgatctcaggccacgggttagtcctcgaagcctccgtgattgcctccatccatggggtggggggtgagtcacagcaccccagtgggcttctgggaggaggaggtgagagggtgcattgcattgaatccagccctgccacacagacctggcactttacacactacgcgagtcaccccaagggggaagcctggcttctgccctctgccctctgccctctgccctttgccctatgtccctgccccatctgcatccccaggaccacccagcatggaaagagcagaggctgaggagcacctatgggtgctctgatgctggccacaggcccgggggtgacagtgacagggatccaggtgcacacctgagtggagcagccaggcccagctggaggagagacgtgttcacccacacacatgcatcctcacatacacagacaaattgcacgcatacatgttgaccattaagcgggcagaggacgctgaccctgggccctgctgagccaggtagggccccgtcatgacagaggctgtgaacccatgctgtcactgtgccaagtgccgccagcctacctccgtgtcatggagcagttggagacacagaggtgctgtaagtggttgtgcagaaaggacccttttctgggtgagaagcacatctcagcaccgctgcctgatcagactcaggaaagcgtgacctgctctcttcccccctgctgacttggggacagtcacaaccaggtgggtggcagctacccgaggagggtcatccatgagcactcaccgggtgcccgttctatgctgaccatgcaaacagtcgtctccttcatcctcacggcgactccatggcggggtggaggggtgctttcctcaaatgtacccactgaataggtgagacgcctgaggtcagaggggcagtaactggcccagagacccagacgtggccctgggccatgctctcagccctggcctgtgccatgctgaactcaagccttgacctctgtgacctccgtgttctggattgcacatctgcctggggtttctgaccccagtggagctgagcctcgccctagaagagcccccaggatggagcccctgtgggtggggtggagggtggtcctccgtccaagtctgtgctctaagatgggtccccacagggggagatctcatcaacccagacttcgggtgcagtcagtgggggttgctgtggaacccactggacatactgggtccctcgtctgggagtggggtggggagccctctatccttgggcagttgtggaaaatgacggaggtccagagggctggccagaaggtaatgatcattcctccttttcgccaggtctggggcttttccccacgtggccctttctctgcctggtcccctagaggcctcgccctttctttgccctgactgttcatgggaggggtccctctggggttctccagaaccaagtccccagagttctctcattctttcttggtgatccggaaacacgaggccccttcctgtattgacagctcagaactgtgggatccaccatcccgccacctgagacatctccgtgagcacagaggctgctttggcccaaaccaagcaccctcccatttggctggtattattcttgacgcggcttctctggccagaaggagtggagatgggggtgaaatggaggagtcacaaggtgtcttgttccctgtaggaaagtgggcctcttggtggtccctgagcgatctgggaggctgagcatatggagctctctggtccctgaccccagtctgcctccaggtgcccaggatagcgcatcaggagcccctcacccttggcaggtggacgcagttcatcctgtgtgtgcctgtctctgggcgtctggggacaacaggcctctgtgtccaggtccccctgtcaggtgcagagactccagagaccccagcaggcatggggccactgggtcttcacccagggctgtggtggcatggggctcacccggccggcggtgtctcagagcccccgggagcggttcagatgttctctgaagcgctcaggtgcagcgttgcctttgggcgatgttgtctcacaggatggacgtggaggaagacgtggctaccctacttgcacaggagcagggggcatcattgcccagtgtgagcaggtacaggtcgggctgctccctcgagagaggtggggcctcgcctctcccactgtgccctggtgggaggatcctgggctcccttaggaagcagggtgggagctggttgcccatgcctttgtgcccccacagcccttcacctcagccccctcactctggacccctctgggtcccagggacgctgtagggcccaaggatgtggacagcttacaaagttaccgatcgcctcgagattctgcagtgagtcctctgtccctgctgcccgaccatcaccaaactcacctcagaggatgagttttgtttttagaaaagcctctctgaggcaggacacgtcttcccagcttgggccagcctcctttccagggtaggaatgccagctggctaccctgcaggtggtctgcagcaggccagagctgcgaggctcatctagggatcttgggggagcaggtggggatggagaggctctcagcagagcagtctcaaaggcagcatgagagtagggaacagcctgagggtctggccctgtcaccctgggccctgccccagtgagacccgcaggctgtggccacagggcaagggggtgcctggcccagcctgtgggcagttgtccagcaggtctctgaggattcagggggcccagctgagccaccctacagggaggggcgtggggggcagtgagggccatacccctgggagggcggaggggaagacgggcagggtgtcagccagggcatgtcagggtgagggcagggatgcagcagaacttgcagctgaaggcaacctgccttggtgctgagagggagcctgggtcctgggaaggggagcccagcctggagcctgcccctcaggagtcacaggacagagagagggaggagcctgggggaggttggttggggacgatcccacgggaggtgccacttctgggacgcacctgaatggagccagcctagggtggagctgatggcctggggtgaacaacacatgaggtggggctttagcagaggggcctcagtcagtccccagggctctgcatggccctccggagaccctggctccccgctggatccgtcagcacaaaggcagagggaggagcaggaaggccgagtaggggcaggcaagacagtgggggaacaaccaggggcccagtgcatggctgccacagtggctcagaggagggcaaggactgatggatggacgacagccccgagagccagctgagtttggagacggggctgtgtggccatcccggctgcccgcggggctcttgctcaccctcgtcacctctggcatctccccggcagcacttagcagcccagtgagagagcggtcaaggcaggcgtgtggatggatccagggccctctctcaagggttctgacagatgagggtcgaagaagggccaggctgtccagtctctgggccagagaggatgggcaaagtcaaggaacaggcagggtcagcagccggggtgcagggagaggcaggtgtatgctggaaggtcaggccccacgagggcccttgggggcatcaagtgggacagggccccggcgcaccctcagtgccctgggcaggcctcgggccagtgatgtggtcactccctcgggaaatgctgttgggaccggaccacccaccctgggccacacccatcccgcctcaggcctggattttctgagctcccgcagagtgtgctgcctagcccaggaggggcacccccattgtgcaatccaagcctcgccctccacaagccccaggcagcccctgttgggtgggccctagttccctcttctcccaggccccagcccctcccaggcgccagctggcagggaagcaccggtcctcccttccctgtgtgtcccctggatggagacctggggcgggggtgggggacagggctggttctttcctggggcccactaggggaggaggaggacagttcctggcccagcacaggtcctcagctctgcctgggttgccttacagtgagacgtagctgccacccatcagtgccctggaagtgaaggtaagagcctgaccctgctgtgtgagtggttggtccagggacagggggacccagtgggtggtcagcaggctgtgggcctgggtggtgatgagtgggagcgacaggctgtccctgggcctgcgggacctgacctcaagactctgtccccatggtggcttgatcaaatcctaaaccgagaaccacagtcgtggctcagcagtcactgcccacttgtgccaagaccccacctgaatgttgggactccaccaacgcccggggtgcctgtggcctgaggatggcatgtcccaagtcatgaggccaggacacctgtgctcattcagtcagagggtctccattccctggggccggccctttcctggctccttccagtttgatcctgtcagggccctggagcccaggacccagcatccaaggggcatcctggcagctccactaacttcatcttatttgacagagaagacatcaggagatgagggacacagaaaaatggctccaggtgcttctcgactgccagcgacataggagcggcaaggaggtgacatggggagggaagggccccgtgaccactttctacagagtcagggtgacgggctcccacggctgtgtcctggcacccccagcctctcagagggtggacactacactgggacaccagctttcctgttcttccctgcaaacctcatcttgccaggagagagtctgatgccagggccagggccagccctagctcaggggtagggacaccccctggtgacccgaaggaaggagtaggtcaagatcagagttcatgaccgggcgcggtggctcacgcctgaaatcccagcactttgggaggccaagacgcgtggatcacctgaggtcaggagtttgagaccagcctggccaacatggtgaaaccccgtctctactaaaaatacaaaaatgaaccgggcgtggtggcacgcagctgtaatcccagctactcaggaggctgaggcaggagaatcgcttgaacccaggaggcggaggttgcagtgagccgagatcatgctactgcactccagcctgggtgacagaccaagactctgtctcaaaaaaaaaaaaaaaaaaaaaaaatttcagcatttgcgacccaccaagacgcagtagttaggactcaagctcactactggcttgggcatccaagcaggaggagaagggtctcaaaggtgtcaaagtaagatggaaagaggtcaaggcccagacccctggtctaacctgagcttgaccaccatttcacagagcaagtaatgacgccctcctcccagacttgccccaaagccccccagagcttggtggtgtcccaggacggtcctcccaggaaacattttgaataagttgctgaagtgcctgatggacgtggctctcgtcacgaaatgagtttggatccgagaagccctcttcttcatcggaaaacaggcaggggtccaatttcccctccacctgaaccctgtcagagcccttccagctgacggctccacatgttgggagggcctctcatttcaagatgggtcaggggcttctcaggattctttagcccaaactgtgccagcccacgaggagcacgtgttatgaacgtcattcccaaagatcctgcggcacttggtgaacagacggtccccttggctccttcccagaggccctgggtcccatgggccaggggtaaaggggcggctggagcccctggtggggctggcaagaggctgagtcccagccagggacatggagttctccatggcttcggagctggagtttccttttcccgccctggagcaggcagaggcactcaacccgggccgagcttgggctgagcagggctaagggaagtatgtcccgggggtccatgcagggggcaggtgtcaggggtgccccagccaccacctggtgttctgtccctcagggaagggtctgcagaggggcctggaatggggaggtttgggggcaggcctgggagccccaaggacctctgctgctcccattaggacaaagatgagctgcgtgcccataattccacgtttacgctgactcctccagtgcctcatcaatgaagtaagcaggtacagtcatacatcagtgaagtaagcagggagcccccagcccagggaccctcctgccccacagtccctgcatcccctcctgcccacactccctgcatcccccagccctccagcccagggaccctcctgccccatactccccagatcccccggatcccccagccctgagatctggctcccgaggaggacctggctcacccccacctggcaggaggcacaggcgtgtccctgcagggcacataagccaggcaatgccccagaggggacatcccacagcagaggccggggctcagcccagcctcatgggcagacagggccaggactcaacctgggagagcccagggaagccccaagcccttggggagcctctccttccaggagccacatccccactgaaatgagtctcctccatgaggaactacaggacctcttctgatccagcctcacaggggagtggggtgggggatctcatcccatggggaggggtccctggtgctccagggcactgaaaccccaatgggccctgctcaagccaccagcccccagctaagaagggtcaggtcctcccactcctgttgttccgaaagactctctttgggcttgccaggcagctacgttctggatggctagcatgtaccgaaggcacaaaacctccagagttggcagagttaagtcctggcgtgcccgaggctatccaggggaacacgcgggacagacagcaccctcagcctgtccccatgaccctctgctccagtctgaggggcaggacaccatgagacctctcagacacagagtccaccctcgacatgacccggatgaaaggcaggagtgtggtgagccccttcctgcccaggcctccccctggccgtggcctcctgtgcacagctggaccccaggggtggcccgaaaaggacccagcactgcccagtgggagggggccatggtggaaacagggtgtggacaccaacctctcccagggacccctcccagcctgatgcccatcctgctcctagagcatctcatgaagctgtcccagtccagcctgggggagctcatccaggaccagttcttccgggcctgggccctggaggatgccatggcgctcaggcaccttcatgtctccatggggttactgatgaggaggcgctgagtcctgctacccccaggtgggccccagtaccaggtcccctcccaagtcaccctctggggcagtcggccagggcccctacagcctcactacctgggccttcctcctgcaccttttttccccctctaagaagcttctggaggccgggcgtggtggttcacgcctgtaatcccaacactttgggaggccaaggtaggtggatcacttgaggtcaggagttcgagaccagcctggccaacatggtgaaaccctgtctctactaaaaatacaaaacaattagccgggcgtggtggtgggcgcctgttatcccagctacttgggaggctgaggcaggagaatcacttgaacccaggaggtggaggttgcagtgagccgagatcacaccattgcaccccagcctgggcaacaagagtgaaactccatctcaaaaaacaaaaaacaaacaaaaaagaagcttctggaaataagcccgtgggtcctcagggcaggtgctgagcacatgtgtgctggacatgctgcagatcaggcaggggaaccaggggaaagactcttccaagccccaccactgccaccttccacagtgccctgcttttgccctcgaagctcgctgaaggggacccatctctgcaagcccacagccctacctgcagcatccacagcctcagagagcagcggggccccttacccctgaaccccctccaagagcatcaggacaacaagccttgagctgtggagacaagagaatcagtatccctggcccagggaggattccaggagaggacacgggcaggagccctggcccagagccagaaccaagagtccagccaggtatggaaatggtccagtcctggcatggagtggatggcctggggccatccatctcacccactgtggagacaggcccccgagtgaggtggcaagggggccaggtgacagcaaaggcctctcccatctgaattctgaatcaggggccgcatcccagccggcacagccctggggtgagagagagaggcaggaagccttgagccagcccaaaccctcggggctgtcttaggagcaacctgaggtgccccaacagctcccccgcccaagcgcacacaaaactgtcactccaggatcagctacctgcaggagagtccgcagcatcggactcagggagccacacagggaccgcagggactccaaagacccgggtctggggggcccggccctgtgaggacctaatgggctcagttggagaagcggacgccacacatctgctttcctttcagcgaaactggaactagggtccccggcacccaggactctgcgagcatcccccaacagcaagcccttctgcaagggagacgggttggcccaccccaggctgtccagctccagcagccttgcaggcagcctctccagaaaaagagcctggtcctccccaccctgctccccacaggctgtccctgaccctgaggcccagaggcacaagaggacttctgtagagcccaggggagcaggctgttctcttggggccccagcgggctcaaggtgtggccaggctgtccccaactcaggatagatcataggctgtcctgcgtacctcctctggaactccctgcccaagctctgccatggacctggacgtcaggggcctgtggtttaactttgaatagggattctggaccttacacgtgtgccctggacagccccagaaccatggggtggggaccgacccagcaagcccaccggggccctgaaacccggccctgccggacactgtgataataaccaagaggcaagtccagagacatccactttgcccaatggcacctgcatccaacttctcagcaggcagtgactggcatggtgtgggggcagccggggcagcacctggccagcacctggccagctgccctgtagcccccgatggctccagtgcctctggacctcattttctactttctacggggaaacctactccctcagaggccaccagagggaagagtgagcaaggcgttcctgcagtcccgaccagccagcggcatgtcctgtggcctctgactcaacctatgagacagagctctgatcccagggcacacttcccaggacacggggcccagcctcaaccagagccctgtgaagggaggggcaccaggatgaccacatgggggaccatggcgctgcacacctgggcactgtacttctcattggagaatccaggcaagatcttgaagcaggtgcatgaggtcctgagcctgtgcagcaaacagcactcatctggggttggcacgaaggggtctacagagccacggccaccgcagcctcttcccggccccatctgtgcagtgcaagtgatccacgcctgctcctaaacccagcccagcaagcagcagcagcccgggcccccaagcccgccaggccaatgtgctgcccagaggcttcgaggccctgcccgctgtacctcccaccacctggaagctgcctcctgacgccttccagccactgctgcagccgcaacaggtgtcgcggccagtgcaggctttccagacggtggcagcgcccagcagccgttgcctcagctctttggtggcagccaggccaacaagggcagcaacgatgactaggatgatgagtgagcaaacagctccacactggtggacaggctgggtgcgcacccggtggtcctcaaaggctcgctgggcctgtaccaccgttataaatttgagatcatgagattataccgtttgccttcttgctttttgaagtacgagtatttttatgcacactttgtagacttcaaaatccatgaagagtctcaaagaagccggatggatggagcctgctgcggatgccttttactctcgtagatcagggtgatttacattccacctgtagtctgcttgcaaacacacagagcagccttgcagctttgtgcctttagactcttggttttgcatttctccctgctcccttcttccttccagtaagctgcaacttttctgattgaaagggtgcaaggctaacacacggaatgactaactcaggatcacatactggcagtgggagaggcaggaggagcagctgccatcaattgccagggccaagtggatgataggatggatgctggtgcatgcggaggaggcagacgcaacgctcatctctaataatgatgtctgttccctcagaggcggctagagcatcacctcttcacgcaagtgtcttgaaactcagcttgaagatttcagcaaatgtgtcttacagagaagagaagagggagtcagcccatcgggattaaaaatatagaggcagtgacaacacacactcggcttcagttcttaggagagttttggttttgattttttttttttttttggagaagattttttttttaatggatctacactgttaactgagactctgttgagattcactggtttacttaaaaacttctcagggatgtctgtaaatttcagtgttatatgtcatgaaaactggtgtgggcagatctgttggttgaaataatttctactgtttcaaatactgaaggcaggaataattggtttatactgtgttttaaatagaagtattactggtaagtcccccaggacattaaaccttaaaaatcagttttaagctattattattgtaagagaaatacaaatggctggaaaatgccacagagattcaaaagctgcttaattgaaagagcaggaagggattctggcttgcaatgccaaagtttcaatgtttttgtagttactgagctaaatcatatggtaattgacagtttctaaatctgtcacctaaaggttaaattatctactgttgccgtgaagtcaaacttactgctgcctcagaaatccctgggtaccgcgatggtcatacagaagtaaggaagtcaatttgaaatgtcagtgagtcaaaatgattaaagaggccaggtgcagtggctcacgcttgtaatcccagcactttgggaggctgaggcagtggattgcttgagtccaggagtttgagatcaacctgtgcgacatggcaaaaccctgtctctacaaaaaatacaaaacaaatttatccagacctagtggtgcgcgcctgtatagttccagctagggggctgaggtcgggggatggcctgagcctgggaagtcagggctgcagtgagccgagatggcaccactgcactctggcctgggtgacacagccagaccctgccttaaaaaaaaaaaaaaaaaaaaaaaagatttaaaaaacggtctgtttatttaaaaagaaaagtgaaataatgcccaacagtacatttactctcttttcaggctgggtgcgctggctcacgcctgtaatcccagcactttgggaggccaaggcaggcagatcacctgaggtcaggagttcgagaccagcctggtcaacatggcaaaaccccgtctctactaaaaatataaaaattagccaggcatggtggtgcaagcctataatcacagctacttgggaggctgaaccaagagaatcacttgaacccaggaggtggaggttgcagtgagttgagatcacgccactgcactccacctgggcaacagagtaagactctgtctcaaaaaaataataataataatttcatatgggttaaattttaaggtcagatgatcacaattttgatattttgtctaattttataccttaggtgacttagagcctgatttaacgtgactttgtcttgactacggatacgtggaactgcagccaaatatattgttctgtttttaaaaaacaacaaaaaaaaaacctgcttcagttactaggactgaagaaaactgggcaaaggggggcccaggaggctaggtccctacatctgccattcttggcagctgcatttcacggttagaaaaactcaggaaatagccgggcgtggtggctcacgcctgtaatcccagcactttgagaggccgaggcaggtggatcacctgaggtcaggagttcgagaccagcctggccaacatggggaaaccctgtctctactaaaaatgtaaaaattagccaggcgtggtggcaggcgcctgtaatcccagctactcgggaggctgagggaggagaattgcttgaacccaggaggcggaggttgcagtgagccgagattacgccactgcactccatcctgggtgacagagcaagactccctctcaaaaaaaaaaaaggaggaggaagaaggaagaaggaagaagaagaagaagaagaggaagaggaagaggaagaggaagaagaagaagaagaaggggaaggggaaggggaggggagggggagggggagaggaggaggaggaggaagaacaactcaggaaaggaggtctcacacactgcagggaggctccaagctacaaagttgggggcgatgggggggaccagggctgccagtaccaatgccttcatccctttgaaggcctccctctcagaagcaaggaccccctccttggcctcaagtccccgccctcgttggttaaaacacaaatcacttctctgtcgttatgacctgcctgtttttgactgaaatggtcatacagaaggaagtcagtttgaaatattggtgagtcaaaatgattaaataggccgagcgcagtgtctcacgcttataatcccagcactttgggaggctaaggcgggtggatcacttaagcccaaagctctctgcaggaagccccggacaccctggggcaggcgggaggagagggcagcacaacccaggctccacccagcttctctcagcttccacctcccaaaggccacagaggagcctgggacaggagcagagggcgggggttccagtgacttctggaacattcatgatggtccgtgcaaagcattcctgggagggtccgtgatcacctctgtccctgggtggctgggctccagcagcccttccttccttctgtccattcttccttctgcctgcacctcctcccagcatgtggcacccccacatcctaagcctgtgtcactttctttccatggattctttgaccgccttcctcttctcactgacttggcatctaggggcttcttggtggaggaaggtaactggtaagaaatgacatactgaggccaggcgtggtggcgcacgcctgtaatcccagcactttgggagatcaaggcgggtggatcgcttgagtccaggagtgcaagaccagcctgggcaatatagtgaggggaaaaagaaaaaaaaaaggaaggaaggaaggactgagaaactagcagagtcttctggctgtctgggtgtacggtccagccctacggggcttagcgggtgttctccctgtgtgcggagatgagagattgtaagaaataaagacacaagacaaagagatgaagagaaaacagctgggcccaggggaccactactaccaagacacggagaccggtagtggtcccgaatgactgggcgtgctgaaatttattgcgtacaagacaaggagggcagggaaggagggtgaatcttccaagtgattgacaaagtcaagcaagtcacgtgatcataggacagggggcccttcccttttaggtagcggaagcagagagagaacgcagcatatgtcagcgttttcttctatgcacttataagaaagatcaaagactttaagactcactatttcttctaccgctgtctactacaaacttcaaagaggaaccaggagtacgggaggaacatgaaagtggacaaggagcgtcatgaccattggaacacagcaccacagggaggggtttaggctgcgggtaggcctagataatatccagccttccacaagaagctggtggagcagagtgttccctgagtcctccgaggaaaggagactccatttcgcggtctgctaagttacgggcgccttcccagacactggcattaaccgcttgaccaaggagccctcatgcggcccttatgcaggcgtgacagagggttcacctcttgccttctaggtcacttctcacattgtcccttcagcacctgaccctctctactcgtcggttattcctaggttatattagtaatgcaacaaagagtaatattaaaagctaatgattaataatgtttatattaatgattgataattgtccatgatcatctctgtatctaatttgtattatgactattcttattctaactattttctttattatactgaaacagtttgtgccttcagtctcttgcctcggcacctaggtaatccttcgcccacatctggggacagtcctcatgtgttcctaagctcagcctcgagggtcctgggctggtcacctcaccgcatctgcactgtgtctctagatccagactccacgggaagggcttgggatgcctagcacaaaggatgcctggtgtgacaaacatccctccattccctggactgcagctcagcaaaaggtccaggtggtgccatgccaatttactgtccctttgagatgagcccatagggccttgtggggggcgagtgtgaagctgggcgcctggagcctaaggccagctgtccctccctgtgtcctggaggaggggccctgtcccaaaaagaccctcaggggcctggcctgtgagtgcagatgtggggaggggagagtctgtgggctgagtgggggccacaggaacggactttgagcaccatggctgaggggcctggtcagtgggaacctggacattgtggcctggtcagccgaggcctggtctggtcagtggggacctggaccttgtggcttggtcaacaggggccttgtcagtgggacctggacattgtggcctggtcagtgggggccttgtcagtgggacctggacattgtggcctggtcagcgggggtctgatcagtgggaacctggacattgtggcctggtcagctgaggcctggtcagtgggtacctcgaccttatggcttgatcaacaggggccttgtcagtgggacctggacattgtggcctgctcagcggggcctgatcagtaggacctggacattgtggcctggtcagcgggggccttgtcagtgggacctgaacattgtggtctggtcagtgggggcctgatctgtgggacctggacattgtggcctgctcagcggggcctgatcaatgggacctaaacaatgtgtcctagtcaatgggggcccggtcagcggaggctttgtgaatggggacacggtccttggggacatagtcagaaaacacctagtaaatgggggtgttgtcagcagggacctgctcggtgaggatctggtctgtgggaggcctggtcagctgtggcctggtcagaggggactgatcatgggtcctcgagttaaggacttagtcacttggcacctcatcagtgaggacctggtcagtgggcgcctggtcagcggaagctgggtcagtgtgatctgattattgggggtctggtctatggggacctagtcattggaaacctggccactggagcctgttcaatagaaaggtggtcagtggaagcctggcagtgagggcctggtcgttgggctcctgggtagtggggcctagtcagtaaaggtctattcagtaaggacatggtcagttggaattttcttagttggggcccagtcagtggggacctggtcagcgagggcctagtcagtgggacttggtcagtagggacctgggcactggagtcctgggtagtggggcctagtcagtaaaggtctggtcattcagggcctggtcagccagaacctcatctgttggggccgtgtcagtgagctctagtcagtggggacctggcaatggaagcctcatcagtgggtcttggatagtgaggcctagtcactggaggactggtcagtggggacttgggtaagggggcctggtccctaaaggtctggtcattaaggacctggtcagttggaaccttgtcactttgggcccggtcagtgggacctggtctgagggggtcttgtcagttgggcccaagtcagtgggagtctcatcagtggggcctggctagtggggcctggtcagtggaggtttggtcagtggggtcctggtaagttggagcctcatcagtggggacctagtcagtggggacttgtcaatgggacctggtcaggggacccttgttagaaggagcctggtcagtggggcctaggtagtgaaacctggccactgggggcctggagagctggggcctgctcagtgggacctggtcagtgttggatgtggttagcggggcctcatcaactggggcctggccagtgggacctggtcaatgggagcttggtcactgaggtcctggtttgtggggtctagtcagtaagggtctattcagagagacttggttagtagggacctggtctttgaggccctggagagtggggcctattcagtaaaggcctggatcactggggtcctggttagtgaggcctagtcagtaaaggtctggtcactgaggacctggtcagtcagaaccttgtcggttaaggacctggtcagttggaaccttgtcagttgggcccagtcactgggggcctggtcagtagggacatggttagtgaggacctggtcagtgggggccttgtcagttgggccaagtcagtgggagtcctgggtagtggggcctagtcagtaaaggtctggtcattaaggacctggccagtcagaacctcgtcagttaaggacctggccagtcagaacctcgtcagttaaggacctggccagtcagaagctcgtcagttaaggacctggccagtcagaacctcgtcagttaaggacctggccagtcagaacctcgtcagttaaggacctggccagtcagaacctcgtcagttaaggacctggccagtcagaatctcgtcagttaaggacctggccagtcagaacctcgtcagttaaggacctggccagtcagaatctcgtcagttaaggacctggtcagttgggtccagtcagtgggggcctggtcagtggagacctaggccatcagtgggtcctggatagtgaggcctggtcattggggtcctgggtaagtagggtctggtcagtgaaagtctcattgatgaggcctagttagtggggtccaggcagtgagggcctcatcagggggacctagtcagtgagtcagtgagggcttggtgagtgggggcctcgtcagtggggccttgtgcctggtgagtgtgaacctggtcttcaggggcctggtcagcaggtgactgatcagtaggggtcagtgcagccctggccagtggctgcctgatcattggacctaatccatcggggcctggcagaggtgggggaggggtgagggggggtggctgtcagtggggcctggtcagtgacatcctggtcagcaggctcctagtcagagggagcccaatcaataaacctggtcatcgggggcctggtcagtgaaaacttggtcggcagggttggtcagtgtgtcctggatattggggattggtcaatgggggaccaggtcggtggagacctggtcatcggggcccatttagtgagggccaggtcatggaaggcccgggtgatggggccctggttgcctggtcagttggacctggtcatcccaggactgatcctcagggaacactctgacttcaccaggctcccctgaccatgccagtccctggcctgcagccaatggtgtcctttgtgtctctcccagcacagacccaggcccaggggatgcccaatgctgggaggaggctcagacagcaggaaggagagaaggaaggaaggaacttccgtagtaccgatgcctacaaaattacaacacgtggtgctgtttctactccatcaccatgttcgctctttatttcctatgtaattctctattcaaccggcctcagttgagcacaaaaccatccttgtaccaccatgaatagttggccatggctctttgatagcaatttttgttctgccgtagaaattatccttgaaccagaaaaaaaaatccccaattcaacactccatttttgtgaagagctggttccgaattctgggtcactttttggaaaaaatatctgttgtggtaaacagtgctgcatctgtgatctcaagtctctactggaattggatagagatggtgaatttcagccagagcgcccaaagaactcgtgtcccgcgctcctgaacgccatcagccgccgcacctccatcttccctcctcccacgagtctcctgctccccgtgactctggtaagagctcctctgtgaacgtggaggtggtctgggaagttggcccagtgctcctgggaccgcactaacaggtccgagacggggtccaggtcctgcctgggccaatccgggaagagcttgccaatggcatcacaggcacctcggggaaggggatggtttggttcaggaccacccagaggcctgctgggcccactccaaggcctggctgaggccacagaagggctggccgcctgctgatgctccttcttgaagcccctcacctgctggcagtgagctccatgccctgtggctgagcagcagcgctgttgtccaccttcctgggcaagcatctgcagctatccatcttgctctccacctcctgcaggttgagggcagtggtgggggtagtgctcagggtcaggaaggagctgacccccaccatgccacccttctcacccttcctcttgccctgtttccaggcctcctcgcagtgttgctgggccacgtcaggaagtgctggaggacgtggcattgcaccaacaccaggcggccagccgtgtggctcatcccgcaaatcaggctcttcctgtgcatggagatggagtccctctggaggcagcccgtggccctgttctcgggcaggtggagcatggagacgactgggaacttcactagacacgcatccagccggttcaagggcttgtcgcgccgtgcaccagcttgcaggagaagtaggtctttatgtccttgaacttgttctactgagtggtgtcgccagcggtgcactgggttctcctgccacttggggccatggggtaggggttttcctgccacttggggccatggggccaagcaccaacagcaccatgcacacagcttgtccctgtctttcacagagcccaacgcctcgccaagcacgaaggcctcccttcccgacttgatgaaggcagagtagcggttgaggttgcggctcacagtgaccgagctcctgcccacgtggggacccagggagccgtcgagctccaggtatgcacctctgcccagtgcacctggatcgttcaccgtcatggagctgccatcccacttgtcgtcccagtcatcatcactgccctagctggcctagttgccaccaaggagctgctgaggccacggcttcagggcatccctaccgcctggaaatcctgcgctggctgctggaaggcactctgtggtggcaccagctgcggctgcagtagcagctggaaagcactgagagatggcttcaaggaggcaggcagtgcaccgggcagggccttgaaacctctgggtggtacaatggccatggcacagtgggtcaaggcacaggggcagccatggcgcgctgggccagtccagggttgcagaccacttgcactgcagatataaggccagggttgctgaggccatgagcccctgcgagtcagcccttgatgtcctgctcactacacaggctcagcacttcatgttctcatagatcactctcaaattttctgccatcaagtggtacagcaactgaatccacagtgccatgggttccctgcgtggtcatcctggccactgtggaggcacgtgacacctctagttcccctcccctcccagggctcaggttgaggccaggcccctctggtcctaggaagtgtgccctgagggtggggctctgtcctgcaggttgagtcagaggccgcaaggcacgctactgatggctagggctgcaggggtgccacactcacccctctctggggaagtcttagagtgaacggcgttctcattagagatgacttcccaaggcccaagagccatctagggctgtggagcagctagccgggtgctgccctaactccttccacaccgggctggtcactgccctccaagaggagtcggatgcaggtgccattgtgtagagaaatgtctctggatctgcctcttggttatcatggggcacagtagtttctggtgtctgggctctgatgaagccgtttagccgatccagggcagatgtggaagtgacaggagctcagcatccctgttcaaggtcataccacaggaaacacaagcccccaacgccagcctgctccatcggaagctttggcatggaattccaccagaggtaccgccagttcacccaaggtctgtcttgagctagggacggcctggccacaccctgagccccggaggttcccagagagcaaccttctgccctgggcgctgcagaaacccccttttcatgccactgggccttggcctcggggacagcctggccaggctagggtaagggaggaccaggctcccattccagaggagtcgcctgcatgtgctgctggagctgggcgggtgggccggggagggccagcccatcccccttgcagagaggctcaatgctgggaaatacccgaagagccctgggtgctggggtccctcccttaagtttgcctgaagagaatgcagatgaacccagcctctccaccaaacccatcagatgttgtcgcagggccaggttctgcacatctgggtctctggagtccttggggcccctctgtcctccaccctagcctgacacagaggacacccctgcaggctgcagatcccagagcaaggggtgtgtgcagctgcctgggtatcccccctgggacaggtaacacaggctttaggctggcttatgcctcgtatcctcatcccagggctgtggggccggggatgcagccctgattaggagctcaggtgggaagaagctctcactgtcacctggcccccttgccacctcacatgggggcctgtctcaacagtgggtgagatggccccaggcacggggtcctctccgctctctggggccatccactccatgccaggactggaccattcccacgcctggctgaactcttgtttctggccctgggccagagctcctgcccgtgtcctctccccgaatcctctgggccagaaacactgattctcctgttcacctggcatccctgaaggcgcgctgtggagtgaggggaccctgctcctcccggcgtctgttgatgctcacagcgggggcagggagctcgcacagaccagagagagtgtaaaaggtgcagggggcacccccgcctgtcttgagcagcatgtccagtacacgtgcactcagcacatcccctgaaaaccggcaggtctatttgtagaagtttctctgtgtagaggaggaagaggtgtgggaggaaggtccaggtagtagggctgcagggacccaggccccctctactatcaactgccccagaggatgactcaggaggggacctgatgctggagcctccctaggggtggcaggtcccagtgtctcctcgtcagttccttcatgcagacccaaaagtgcgtgagaaccacatcgtcctccagggcccaggcctgggagaacgtctcctgaaccaatccttatagtccagactgggacatattcatgaggcactctagggacaagggggtagcatggaaggggtcggtgcccacacccaggtttccaccacagctacctcccactgggaggttctgggtccttttgcagccacccctggcttccagctgtgcacaggaggccatggccagggggaggcctgggtgaggaggtgcccaccacactcctgcctttgatctgggtcttgtcaaggtgggctccttgtctgggaggactcagtgtcctgctcagcacaacaggcccagcctggccctccagactgaagcaaagggtcatggggacagtgtgagggtgctgtccctgggccagtccaggtctgtcctggggagtggggctgggggtcttcctggcatgttcctggaacagagtcactgtgaggatgaacaggatgactgtctgcctggtcagcacagaacgggcacccagtgagcactcgaggatgaccctcctcgggcagctgccgcccacccagtagcgactgtccccaagtcagcagggagggaagagagcaggtcacgctctcctaagtctgatcaagcagccgtgcagagatgtgcctctcacctagaaaagagaaaagcgtcctttgggcagaacccactcacactgtgtctccaactgctctacgacacagagccgggcaggtacctgggtgttgggtaatggtgacattgtgggctcacggcacccatcacaacggagccctgcatgggtcagcagggcccagagacggcatcctctgcccctcctgaactgtcgacgtgtgcgtgcaatgcgtctgtgcacttgagtgcaggtggatatgtgcgggtgcgtgtgagcgtgtgtctctcctccggccggccctggcttccccaatcacgtgtgcccccatgtcctcatcactgtcaccccagggcctgtggtcagcatcagagcatccacaggtgcgccccagcctctgccttcaggcagggtggtcctggggatgcaggcagggcagggcagtgccgtgggtgaaaccccctccctcgggagggactcagtgtatacggtactaaatctgcatagcagggccatattcaatgcacttctcctcctcccagtagctctctggggtgcagttgatttcatctcccctacaaatggaagaaaggaggcttctaggacaaaccccctgcctgaggtcacccagcagccagctgacctcgtccttactaagtccccactaaccaggcccccactcaccaggtccccacccaccaggtcctgttgactaagccggactgatcgtgttctgtgctgaccaagccctgcagactgggtcccactgatcagtcccccccagtgaccaagccaccactgacccggtcccccgtgaccatctacccacagacaagggcccatcttcttaagtcaacccatctaagaaaatgggtttggccccagaccaaagccattttcttaagttccatggagctcactagggtataaagccaagtggggagaggctaagcttcagaatctggacgttttcaacatttccaggtatttccacattcttcacagtgatttcaccaatgtgctctcccaccattgagggtttctacctgcctccaaaactgctggtgttgccagacttttcatttatgttgggtgttgggtttgaaatgcctcatggtggcttcttgttcctcatgactggtgaggttgggtgcccttgtattttaatcctgtgccaactgggcccccccacccccacccccgccacttgctgtctctgcttcgtaaggagatcttcttgcccggtcaactccgagggatcacaggttcaggggtgcccccaaaatgagacacttagtgtttgatgaatgaatgatgatgttgaggccaggagtgagaggaaggtcagcaggcagacagggcccatgtggacagaaagggtttattccaagtccagacatgaccaatagcgataaaaagggggaacaattggagtaatccatgggagaaggagtgagcctgaatttgaaagatggagagaactggacgtggaggaggggagggaggaaggcagaacaaaggaaataagaagctgttgaccaaaatacatatgttgtgattccatgcatatgatcaaaacgtgatcgtgtaatcatgcacatttctcaaattcaaatggacaaggtatacataatttttcccattcctcccacgaagcacaactaaaaccctgggccagacatcatacataaaaacataagactctgaataagattcagcctttaaaaacaaagcttgtgtttacgtggatgaacccggaagacgttcagtgaaataagccaggcacagaaaaacaaatacttcctgtctcacttgtggaatctaaaaagctgaactcccaagtagaatggtggctccagggactgagggagggaggagggactgaacagatattggccaaagggcacaagaggaattgttcaacatggtgactctagtcaatgtattttattcttgaaaaatgctgagtagtctgggcgcagtggctcacacctgtaatcctagcacgctgggagactgagggggatcacttgaggccaggtgtttgagaccagcctgggcgacatagtgagacctcatctctttttttttttttttttttttcaatataaaaaaactgaattgctgagcaaattttaagtgttcttaccacagaaaaagagataagcatggaggtatggtcacgggtatgtcaaggaaatgttaaattagcttgatttagatattttacgctgtacgcctatgtcaaaacatgttctatgcatcatatttacaactttgtcaaaataaaaagtgattgggaaattggatcaaactagaaaaatgtaagactctgaatgatggagggaaggcagacacagtgggaatttcaggacccaaggaatgacacgaaagtcaattctttggtgttttgttttgtttttcgccacatacagcccaggcttggacctgaagaagctggcaacccgcgaacgccaacaggcacagtcgaaaaaagcaaaagaaaaatcccaaacaaaatcctgttctccctagccaaaggaccaggagagggggcagcccagcaagacaaaacacatttacacaattctggctaacctcagccagtccttggccgtgagttcgtttttctgccacctcactttggggctgggctggttctccaccctcgcagggtgcgtttctcaatccagacgctggggggcgctagtacctcgcgagctccgcgaggatcattcccgggacgccgcggagtcacctcccctcctagggacccagagcttcccagggccgcgcctgtaggttttccagaggtccccgaaaacgttaaagacctggaaggaaaaaaaaactgtaaaaccacacactttgatatttgacaacgtaaaagcaaggctgcaaaatcaaaatcaatgaacgcttgaaggaaatgtctacttagctagacatagtgccacctggattcactgttggctccagaatcccccccacggtgtcatcacgttggaaagtttttgtgggttagatgttctctgttggcaagaatgcctgtacatgcccaagaagcatatgagtttaatgggaccccaataacttcaaaagcaaaaagataacgatcctttctacttttttaactttgtgtgtgtgtgtatcagggtcttgctctgttgcccaggctggagtgcagtggcgcaatcacagctcactgcagcctcaaattcctggactcaaaccgtcttcccacttcagcctcccaagtagctgcgaggatgcacaccaccacgcccgactaattttttttatttttttagagtcagggtctcactatgttgccagggctggtctcaaactcctgggctcaagtgatcctcctgcctcggcctcccaaagtgctgggattataagtgttagccaccgcacccagcttcttcttgttttaacaggaagaaatacattcaatgtgagtgccttttaatgtttgatattaaacaagtcctccacgagtgcaggtacccagggatgtgccatacagccctctgccttcacctatgctgttccctttggcctccatcacccttcccttcccacatcagccaattcacctcccattcatccttcatattttagctcagtgttaccacttcaggaaaaccttccctggtcccaagggacaagatactgtttgtcttcacctggaacatcctaagggctcaataacgaatgaatgaatgaatgaatgaatgaatgaatgaatgaatgaatgaacacaggtgcataagcatgataggcttgtccttgtagggccttcccatgccactcaaaatacatatgacctcattgcaaaaatatgaatactggctcacaaagtcatcctgcaaaatcaggcacattcaacaacagccctgtgctgagccgtgtcggggcagtagagaaagctcaacccaaaaccctactcttgagaggctcctctctgggggttggagcacagagccagacacagacatcactggcctgtgtgttcaatgaaggaagggagggagggaaggagagaggccgggatgaatggttggatgggtggatggatgaagggatggaaggatgaatgagtggatggatggatggatggatggatggatggatggatggatgaatggaggaatggagggatggatggatgaatgggtagatggatgaatggatgcagggagggatggagggatggatgggtggatggatgaagggatggagggatgaatgggtggaggatagatgaataaacgaatggatggagggatgaagggatgaatgggtagatggatgaatggagggagggaggaaaggaggggtggatgggtgggtggatggatggatggatggatggatgaatgggtggaggatggatgaataaacgaatggatggagggatgaagggatgaatgggtagatggatgggtggatggatggaggaatggagggagggatggatgaatgggtagatggatgaatggatggagggagggatggagggatggatgggtggatggatgaagggatggagggatgaatgggcagaggatggatgaataaatgagtggatggagggatggatgatgaatgggtagatggatgaatggatgaagggatgaagggagggataaagggatgaatgactgggtggatggatggatgaatgaaggaatggagggatgggtagatggataaagggatgaaaggagggatggagagatgaatgggtgaatggatgtttagggatgggccagagcaagggcccggaaatggggagtagtgacaggaatatgtcccatagaaggtgcttgggcttggtatggaaagcagggtatgaggaatcgtctgtaggaacagggacattccaagcagaggaaactgcagaggcaaaggccctgcagctcaagaaaacctggtttcaggatacagtagggagtgggaaatgactacagaggagactggcaaggacaagtggagccaggttgtgagggacccatccacgacccttaaccatgaattttgccccaaggcatgcatcaaagtactggctattcttagtatcagtattaagatggtatgacacacccaagagtttattatatgctaatagcttcccctgttaatttcagtttggaaaacatgttttatagtgttcacactactctggtggtgcaatatttagtttttaaatcaatatgcctgtacaaaactgttacacaatggcccacaactgtaaccccagtgccttgggaggccaaggcaggaggatccattgagaccaggagtttgagaccagcctgagtaacacacatagtgagaccctatctctacaaaaaaaagaaaaaaaaatttttaatgttggaacatgaaaagatgttcaacatgattagccatcagataaatgcaaatcaaaaccaaaatgaggccaggcatgtaatcccagcactttgggaggtgaaggcaggaggatcacttgaggtcaggagtttgagaccagcctgaccaacatggcaaaaccctgtctctactaaaaatacaaaaattagtggggagtggtggctgatgcctgtaatcccagctacccaggaggctgaggcaggagaatcccttgaacccaggaggcggaggtagtgagctgagatcacgccactgcactccagcctggatgacagagtgagactatctcaaaaaaaaaaaaaagagagagaaagacttcacacttcacactccctgaggtggctataagcaaaaatataactacaaatgtcagcaagtatgtggagaaattggaatccttgtgcattgctggtgggaatgcaaaatggtgcagccactatggaaaataatctggcagtttctcaaaaagctaaatatagaactcccacatgcccccgcaattccgctcctagagatatacccaaaagaactgaaaacaggaccgcaaatagatatttgtacactgacatcatagcagctctattcacgctagtcaaaaggtagtaacaatccaagtgtccgtccgggacaatggaatattactcagcaatatacagaaataaagttctggccagacacagtagctcatgcccgtcatcccagcactttgagaggccaaggtgggcagatcgcttgagcccaggagttggagaccagcctgggcaacatggcgaaaccctatctctacaaaacatacaaaaattagccaggcatggaggtgcacacctctaatcccagctactcaggaggatgaggtgggaggattgcttgagcccaaaaggcagaggttgcagtgagccaaggtcaagccactgcactccagcctgagggacagagcgagagactctgtccaaaacaaacaaacaaacaaaacctcagacagtattatgagaactaggactttgcttttaattataattctgttagttcaatagaacctgagagaagactcaacacttatagaaatacttaaatagaaaaatagaagtctcagccgggtgcagtggctcatgcctaatcccagtactttgggaggccgaggcaagcagatcacgaggtcaggagatcaagaccatcctggctagcatggtgaaaccctgtctctactaaaaatacaaaaaattagccaggcatggtggcaggtgcctgtagtcccagctactcgggaggctgaaaggcaggagaatggtatgaacccgtgaggcggagcttgcagtgagctgagatggcgccactccagctggacaacagagcgagactccgtctcaaaaaaaaaaaaagaaaagaaaagaaaagaaaaatataagtctcaacaggatttgatgaaggctcaggcgtgagtgtgagagaaaggtagtcaagggtgacttcaaggttttggatgagaatgaccagaaggatggagctgctgtttactgagatcattaccaggtctcttgcatcctcaaaaaaaataataataaaaaggatattttctttttccttttttttttttttttgtttgagacagggtcttattctgtcatgcaggctagagttcagtggcctgatcacagttcactgcagaggtcaatggtttcagcgacctctggagcacttatgatgtcccaggtgaagacaaacagtatcttgttctttcaaaaaaaaagaaagttctaatccatgctgcaatgtgaaagaacttcaaaaacaagctgagtgctatgggaggccgaggcaggcggatcacgaagtcaggagatccagaccaccctggctaacccagtgaaaccccatctctactaaaaatacaaaaaaaaaaaaattagccaggcgtggtggcgggcacctgtggtcccagctactggggaggctgaggcaggagaatcgcttgaacccgggaagcagaggttgcagtaagtggagatcacacctctgtactccagccgcctgggggacagagcaagattctgtctcaaaaaaaaaaaaaaaaaaaaagaactggggatagaggccgaactgggtttggcacacagtctgtgggctcaaaagcaagaccagccaggaaacaagggcgcccaggaggtgtccgaactctcaggatgggagctcgaaggacgcagtgaccttgacgggagaatggtgatggaatctgcaatttacttacccacccacacagccctctcctagtagttccttgatggtgggagccacattgagtgtgtgtgtgtgtctttgtacgtgtgtgcacgtgcatgtaatatttcaggcatacaaaagcatagataggctgggcatggtagcacacacctgtaatcccagcactttgggaggccaaggtgggaggatcacttgagcctagaagtttaagaactgcctggacaagatggtgagaccttgtctctatatattaaaaaataaaagtaggccaggcgcagtggctcatgcctgtaatcccagcgctttgggaggccgaggcaggcagatggcgcctgaggccaggagttccagaccagcctggccaacatggtgaaaccccatctctactaaaactacaaatattagccaggtatggtgtgcacacctgtaatcccagctacttgggaggctgaggcaggagaattgcttgaacccaggagatgcagattgcagtgagccaattgcgtcattgcactccagcccgggcaacagagcaagacactgtctcaaaaataaataaataaataaacagcatagataggggccaggtgttgtggttcacgcctgtaaccccagcactttgggaggccaaggcaagaggatcatttgagcccaggagttggagaccagtctgggcaacatagagagaacctgtctctacaaaaataaataaataaataaaaataaaattaaaaattaaaaagcatagataataattcgtgctggaacacagcttgtattcatcacccaacttaagaagaaaaaaatcacggataatactgatgctgtatatacaccacttcacttccatttacctctctctctctgtgtctccctctcatttagcatttatcattcccatgcacatttttttttacctttacaacatgggatgtattcatgaacactatatagaattgtggctggatgtagtggcacgtgcatgtaatcctagctatttgggaggctgaggcaggaggatagcttgagtccaggagttcaagcccagcctgagcaacatggtgaaaccccatgatatggcgtggctgtgtccccaccaaaatctcatcttgaattgtagttcccataatccccacgtgtaatgagagggactcagtgggaggtagcttaatcatgggggtggttaccctcacgctgtgcttatgatggtgagtgagttctcaggagagctgatggttttataaggggcttttgcccctttctgctaggtgcttctccttcctgccaccatgtgaatagggacgtgtttgcttctgcttctgccatgattgtaagtttcctgaggcctcctcagccctgtggaactgtgagtcaattaaacctctcctttataaattacccagtctcagcctgggtgcggtggctcatgcctgtaatcgcagcactttgggaggccaaggcaggtggatcacaaggtcaggagattgagactatcctggctaacacgatgaaaccccatctctactaaaaattcacaaaattagctgggtgtggtggcacacgcctgtagtcccagctactagggagactgagacaggagaatcacttgaacctggaaggcggaggttgcagtgagccaagatcacaccactgtactctagcctgggagacagagcaagactccgtctcaaaaaaaaaaaattaaattaagaaaaaacataaaataaaataaattacccagtcttgggtctgtcttctttagcagcataacagactaatatgccccatctctaccaaaaaacaatatatatatatatatacaaaaattagttgggcatggtgttgcatgcctgtagtcctagctactccagaggctgagaggggaggatcacttgagcctgggaggcagaggttgcagtgcagatcacgctactgcactctggcctgggtgatagggtgagaccctgtctccgtaataaataaataaataaataaataaataaatttattttccccagttgtcacatggagacaagcccatcagggacaagactagaagtagacaaaccagtcaggtaacaactgctagagccaggtgctaaagacaggggcttggaacaggatgggtgtagaaaatgtagtgaggcctgtttggatacatggatatttttggaaggcggggtcaacaggatttgatgaaggctcaggtgtgggtgtgagagaaaggcagtcaaacatgacttcaaggttttggatgagaatgaccagaaggatggagctgctatttactgagataatcaccaggtctcttgcatccttaaaaaaaaaagggatttttttttcctttttttttttttttttttgagacagggtcttattctgtcacccaggctggagttcagtggcttgatcatagctcactgcagccttgaattcctgggctcaagcaatcctactgcctcagcctcctgagtagctgagaccacaggcacaccgcacccagctaatttttgtagagagagattttctattaatatcaataatctttttcaaagtgttgagtcttctcttagcttctattgaactaacagaattataactaaaagcaaagtcttagttctcataatactgtctgaggtttgtttatttgttttagacagagtcacactctgtcgctcaggctggagtgcagtggtgcaatctcggctcactgcaaactttgtctctgggattcaagtgattctcctgccttagcctcccaagtagcagggactacaggtgtgcaccaccacacctggctaatttttgtatttttagtagagacagggtttcaccatgttggccaggctagtcttgaactcctgacctcaagtgatccatccaccttggccccgcaaagtgctgggattacaggcataaaccactgtgccagacctgtctgaggttttatgtattcaacacctcacccattgattaagtcccagaaattatttaatcatcatatttatttgatcagtttgactttattaatatttgttccacagagctttacaggcatcctttaactgatttctaggattcaataaatttacattttttactttcttcaccaaacaacaaattcatttttataaaatttagttgaccctctgagagtttctttataccactgttctctcaagattgatattaattctgttagttatcttttcttttctttcttttttttaatgtttagttttttagagatagggtctcactcttttgcctaggctggagtgcagtggtatgatcgtagttcactgcagcctcaaccgcccaggctcaggcaatcctctctcctcagactccaatgtagccgggactacaggtgcacgccaccatgcctggctaatttttgtattttttacagagacagggctttgccatgttgccaaggctagatcctattggttttcaaatggtatatcacatttacttctataatatcttacaattacacttctgtttcatcattctcataacttactattacgtgttcaaccacgttttaggtatcatttaatacacattgctaggtactaaatgattgctatgtacattattgttagttttaaggactggaatatttccttcttataaagccaaaagaaagtattgacatgcaaggacagacaatgtttttgaggagcattgaaagccaaggagcagagaaaaggaggtagttggaagaaagaagggattctttcaaagctggaagaaattatagaatccttacatctggagctggattctccccagagcaggttttgagtcgaggaattgagtgtaaatattcaggagataatctccagagacccagtgagcacctggagaagagaaatgggaaggaagggtgcggttaaaccttcccctctgggcaggaagatcgcttgaacccaggaggtcagggccgcagtgagctatgatcacaccattgcactccaggctgggcaatccaaaggagtaatccctgagatataatactatagaacaccccagaactgccccactcaggagtgaggaagccagggactcacccaacaagccctgtccctcaacagccaagggtcacttctaggagtgggaactcccagcacatccacattacccccatgtgcaggctgagcctgctcctgtggtcagatgaagccctcgggcatagagacacatggtggtagaggtaaagggtcagtgtgtctgggagccatccacccagatgacaccctgcacatgggctgggggaaaataaacagtgttgcttcagtgtgtttgctgataaaaatgaaggagcaagccaggtgcagattcacacctgtaatcccagcactttgggaggccgaggagagaggattgcttgagcccaggagttcaagaccagcttgggcaacacagcaagaccccatctctaaaaaattttcaaaattagctgggtgtgctggcatgcatctgttgtcccagctcctcctgaggcggaaggatcacttgagcccaggaggtcaaggctgctgcagtgagctatgatctcaccaatgcactccagcctggggaacacagcaagatcctgtctctacaaataaaaattttaaaaaaggaataattgagccaataggaaggaggaaattctattgcaggaaagagttgggagaattgctgaatgtctgaacccaaaagaggggatgagatcgggatgcaatggggtcgggggctggcctcagccagaaccgtggacagctcctccgtttcctttctagttgacccaggttagctacggaagggatgaacgtctaaggcagaatagcgaattaggataaccacgggttaaggcacaagcataagaacagcaggggcagccacttctaggcaacattaggcagtatccaggccacatcctccctcctataataacaagacagaagtttccacttcagcctctgattggtcatgggctgtctccacttcagcctctgattggtcctgggctgtctccacttcagcctctgattggtcacagggccacccttcatagggtgtagccaattagaggcctctaaagggcacctgaggtgttgccaaattattctagcttaataaaaacctcagttgggggtgctcttgagccacttgctcgagcccacttccactctatggaatgtacttttgcttcgataaatctgtgctttcatgactctgttcttctgttgcttgtttgtctttagttgcttctttcttttattgctttgctttgttcaacactccaagaacttggacaactcacagtcaagaccttccgtctggtaatctggtaacatcttgcctgggtctctgagtttctactcttgggcctcttggaggaactcatgctcatcctcttcctgagcatattcctggtcactgggctgaagaacctgctcatcaacgaattgcttgagcccaggaggcagaggttgcagtgagccaagatcacaccactgcactccagcctgggcgacagagagagactctggctcaaaaaaaaaaaagaacctgctcatcatcccagccattgccactgacacccggctctctgtgctcgtgcgctttttccttgccaacctggccttcgtggtcacttgcttcacctccaccaccatccccaagatgctggacgtgcaaagagatcccttgtgtcatgtcaggatgcaaagggattccttatgctggttgcctgacccagatgctcttcttcatctgttaggcatccacagcttcctgctgactgcaatggccaatgaacactgtgtggccatctgtcactctctgaactccatcaggtctgtgacaccatagctctgtggcctcctggtggtggcctcctggaccttcgcattcaggaatgccctgacccacccagtgttactgacccgcctctcactctgcacctacgagtgggtcagccatgtcttctgcaacctcagccagctgctgaagttggcctgctcagacgccactctcaacaatgtgacggtgcaaccgctacacaaaacacaaggacatgaatgccattcagccacacattcttttggcacttcataataataatcacttttcctcccattttttgtggttgttgtattgtttaaacaggtctcactctgtcaccctggctggactgcagtggcatgatcatagttcactgcagcctcaaccacccaggctcaaacgatctcccacctcagcctcccgagtagctgggaccacaggcgtgtgccatcatgcccagctaaattttttgtattttttgtggagatgaagtctctccatattgcccaggctggtctcaaactctggggctcaagtgtgcctgcctaagacttccaaaatgctgggattacaggtgcgagccaccgcatctggcctcttccagttttcaacaacatggtcctcatttccatctgggacctcctcagaatggcctttgccattcatattgctacaacattctcatcactgccacctaggtaaactttgaaaagattgaggctttctctccttttcttttaagacttcaccagaatcacttttaaggccttgttcacaataacatagtctttttctagcatgcacctgcacgctcttccagcctctacccattacccagttccaaagctgcttccacattactgggtattttttttacaataacactccacttcttggtaccaatgtcttagtttgttttagctgctagaacaacatactttagactgaataatttataaacaacagaggtttattgctaacagttctgaaggctgggaagtccaagatcaaggtgccagcagattcagtgtctggtgagagcccatagatgatgccttcaaatggtggaaggggcaaacaagcccctccagggctttttttgtggggggaggggggaggtgaagtattgctctttcacccagtctggagtgcagtggggtgatctcggctcactgcaaccttcgcctcctgtgttcaagtgattctccggcctcggcctcctgagtagctgggactacaggcacgcaccactatgccccactaattttttttgtatttttagtacagatggggtttcaccatgttggccaggctagtctcagactcctgacctcaagtaatcagcccaccctggcctcccaaagtgctgggattacaggcaggagccaccacacccagcctgttgaaaaaattatttgaactttacaatttattgctggaaatgtaaaaaataaatgttcggggtgactgtcaaattgggggaaattctatcaagtttatgtaattttgagctgtaaggtttggaaaacaagcttctgtatatgacgtacattagagctgtgcaccatcggacactatagtgtccagttcaatgggaggaacctgttgcattgcaccctgacctctgactttgcacctctgtgtcacaatgtctttgctattgtgaatagtgcttcagtgaacacatgcatgcatgtgcctttttggcagactgatttttgttttctttggagtatatacccagtaacaggactactgggtcgaatggtagccctgtttttgggttttgttttttgttttttgttttttgtttttttgagatggagtctcactcttgtcacccaggctagagtgcaatggtgtgatcttggctcactgcaacctccgcctcctgggttcaagcgattctcctgcctcagcctcccaagtagctgggattgtaggcagccaccaccacgcctggctgatttttgtatttttagtagaggcggggtttcaccatgttggcccagctggtctcgaactcctgacctcaggcaatccacccacctcagcctcccaaagtactgggattacaggtgcgagccaccgcacccggccaggtagctctgtttaatttctttgagtaatctccaaactgctttccacagtggctgaactaatttacattttcatcagtacaggataaacattccattttctctacagtctctttaatgtctggtggtttttatttttgttttttgtttgtttgttcattttactttttcagaatagccattccgactggtgtgagatggtatctcattgtggtttttatttgcatttctctgatgactagtgatggtgatcattctttcatatgtttgctagccacttgtatgtcttcttttgagaagtgtctgttaatgtcctttacccactttttaatggggttatttggtttttgcctgttcaattgtttaagttccttgtagattctggatattagacctttgtcagatgcacagtttgcaaatattttctcccattctgtaggttgtctgcttactctgttggtagtttcttttgctgtgcagaaactctttaatttgattagatctcatttgtcaatttttgtttccattgcaactgcttttgaggacttagtcataaattcatgtttcctaggttttcttctaggattcttatgatttgaggtcttacatttaaatttttaatctatcttgagttaatgtttgtatatggtgaaagggaggggtccagttacattcttctgcatgtgacttgccagctatcccagcaccatttattgaatgggaagtcttttcctcattgcttgttattgtcaactttgttgaagatcagatggtggtaagtgtgtggctttatttctgggctctctattctattccattggtctgtgtgtctgtttttgtaccagtaccatgctgttttggttactgtagccctatagtatagtttgaagtcggataatgtgatgcctccagttttgttattttttcttaggattgctttgactattcaagctgttttggttccataagaattttaatatagttttttcaattttgtgaaaaatggttttggtagtttgataagaatagcattgcatctgtaggttgctttgggcagtatggccatttgaatgatattgattcttctaatccatgagcatggaatgtttttccatttgtttgtgtcatctatgatttctttgaagtgttttgtagttctccttgtaaagatctttcacctcctccattagatgtattcctaggtacttttttgtgtggttactataaatgggattgtgtttttggtttggctctcagcttggatgtattggtgtatggacatgctacggatatttgtacatttattttgtaccctgaaaccttgctaaaattgtttattagttctaatagctttttggtggagtccttagggttttctaagtatggaatcatattgtcagtaaagagagatagtttgacttcttcttttcctatttagatgacttttatttctttctcttgcctaattgctatggctagcacttccagtattatgttgaacagttgtggtgagagtggccatctttgtcttgttccagttctcaaggagaatgcttcaagttttttcatgttcagtatgatgttgttccctagcttcttgtggtttgctgccaatctttgatgttcctcggctcgtagacctctgcattcatcttcacacggcattctccctgtgtgcgtatctgtctttaaatgtcacctttttataaggacaccagttatactgtattaggagcccaccattctccagtatgacttcatcttagttattatacttaatcctatttctaaataaggtcacattctgagatactggggattaggacttcaacatatgaactgggagaagagacataatccaactcataagatttgctaaaaataaaaagaagaaaaggccgggtgcagtggctcacacctgtaatcccagcactttgggaggccaaggcaggtggatcacttgaggtcaggagttcaagactagcctgaccaacatggtgaaaccccatctctactaaaaaaaaaaaaaaaaaaaaatacaaaattagccaagcatagtggcacatgcacatgcctataatcccagctacttgggaggctgaggcaggagaatcgcttgaacccaggaggtggaggatgcagcaagctaagatcatgccattgtactccagcctgggcaacaagagcaaaactctgtttcaaaaaaaaaaagactctagtgagtggattcatagctgaagcaacatagtagcttatttctcacataacagaatcctaggtcagtgcatggctctactcctctcagtcactcagagacccaagtttcctgagtcttgtttcccacctatttcctaaacattgttcttgtttataagagcaaagctgtgaactctggattacaaaaaataataataatcagagtgcatagaggaggcaagcctattgtctggaaatgccacctacttttcacattccacactggattacacctagctgcaagagaggccaagaaatatgacattggaaccttggtccctaaataattgcgtgaagcagaatcgcatactgaactgaaactagagagaaaagtaaactttaaaatattgaattttggacctctcacttctttttactggagcttagacttttgtcctaacaaacgcagtaactggttccagaagtggggtacaccataaaaatagatggcatttgcttaatgacagggttgtgaggacgcagatatttcagactggaaagctgagtatcttccttaggccaaggcaaaacatttggtaaaacatggtcaaccaagttgctaggctgtgatttcgttattatagaaggggagaatggatttttgtagagagctagcagtccacattccatcctctagccaccaaatatataaaagcatgcttcttcccaccatggaatacctttatacccttcctggaagaaggcaatatcccatgttattgatgcatccagctcagagtccaaaatctctggctaaaacacagtcttcatcaggcaggtataagaaagatggggacttagtggtcaagaacttgaccaatatgcaaacagagatggaagaatccacagataaaagtccacaaagagttggagaaatcatctgaccctgatctctccaacagtgagtggtaaataggcttttcatttgaaaggctgaggtgggtggatcacctgaagtcaggagttcaagaccagcctgggcaacatgatgaaatcccgtctctactaaaaatacaaaaattagacaggttggccaggtgcagtggctcacgcctgtaatcctagcactttgggaagccaaggcaggtagatcatggggtcagtagttcgagatcagcctaaccaacatggtgaaaccccgtctctactaaaaatataaaaattaaccagccaaggtggcatgcgcctataatcccagtttcttgggaggctgaggcaggagaatcacttgaacccaggaggtggaggttgtggttatctgcgatcacgccactgcactccagcctgggcgacagtgcaagatgctgtctcaaaaaagaaaaattagccaggccatggtggcagatgtctgtattcctagctactcaggaagctgaggcaggagaattgcttgaactggggaggcagaggttgcagtgagccaagatcgcgccactgcactccagactgggcaacaaaagcaaaactgcatctcaaaaaaaatgagggagacagagaaggaaagaaggaaggaaggagagagagataaagaaagaaaaaggaaggaaggaaggaaagaaagaacaaaggaaggaaggaaggaagaaaaagaaagaagaaaaaaaagagaaagaaagaaagagaaaagaaaaaaggaaagaaagaaagagccagcactttgggaggccaaggcaggcagatcatgaggtcaggagttcaagaccagcctggccaatatggtgaaaccccgtctctactaaaaatacaaaaattagctgggtatggtggcgtgcacctgtagtcccagctactctggaggctgaggcagaagaatcgcttgaacccaggaggcggaggttgcagtgagccaagatcatgccactgcactccagcctgggcgacagagcaagaccctgtctcaaaaaaaaaaaaaacaaaaaggaaacttgagcatcctgggttttttgtattttcagagggtcttggaatctatcccctgtggataccgagggttgactgtgatttgggagtgtagagggatttcttattttaaaaaggaccccctaagccaaagaaggcagctttgaaggatgtcttaagattgtggtccttccttaaagaagtgattgtcaacaaggaggatgatttcactcgctcccagccccggggacatttggccgtgtccagaaacagttttgactgtggtgacgggatgggatactactggcatgtaacaggtagaggccaggaatgtggctcaacatcctccaatgcataggaaagtcttgtgctataaagaacaatccatgaggccgggcgcagtggctcatgcctgtaatcccaacacgttgggaggttgaggcgggaggattgcttgagcccaggaattcaagaccagcctgggcaacatggcaagaccccgactctgctaaaaaccaaaaaacttagctgggcatggtggtgcatgcctgtaatccatgcctgtagctactcgggaggctgaggcaggaggattgcttgagcccaggaggtcaaggctgcagtgagccatgattgcagtactgcactccagcctgggtgacagagcaagaccctgtctcaaaaaaaaaaaaaaaaaaaaaattattcaggcagcaaagagttaaggtatgccgtcccactctgcacctactttgaaaggtagctacaaaccaggcgcagtggctcatgcctgtaatcccagcactttgggaggccaaggcaggtggatcgtctaaggtcaggagttcgagaacagcctggccaacatggtgagaccccatctctactaaaaatacaaaaattagccaaacgtggtggcgggcccctgtaatcctgactactcaggaggctgaggcaggagaatcacgtgaactcaggagacagaggttgcaatgagccgagatcgtgccattgcactccagcctgggtgacaagagcaaaactccatctccaaaaaatattaaaaaattaaaaattaaaaattaaaaaattaaaaataaataaataaataaataaaaagtagctgcatttagctgggcatggaggatctcacctggaatcccagcacttgggaggccaaggtgggaggacagcttgaggggccaggagttcaagactagcctgggcaacatagcaagatcccacctctaccaaaaatgtaaaaattaattaaaaaaaaagagaaagaaataaaaattagccaggtgtggtggcacacacctgcagtcctagctacttgggaggctgaggcaggaggatcacttgagccaggagttggaggctgcaatgagctatgattgcatcactgaactccaccctgggcaacagagtgagaccctgtctctttaagaaaaaaagaaaagaaaagaaaagaaaggtagcagtaaaagtgagacctaaccaggccaaatctaggatcccaagagaaacaccttggtgacagttgtcatcccagagacacaagtagttgtcaagaactgtgaagagtctgggatcttatcctacttgcaagtggacaattgaacctgctacagttttatggatgtgggcagaagacacgagactccagtatcagagacaaaggactttattactcatggcacagcaggcagcatgaactttgtgtttgcactagcccacattgggttagttccacagccaaggaactctgagcttaaagatctcgatttttatagttgattgcaaacaaacctggtctattttaataccagagggagacattatctttattatatggatagcaaatgaaactgccctctgcttcacaggaagaaactctgtcttccaaggctgtttgctatacaaacatccttgaaaagatagctggaataaaagctgtctgagcccctgattttggggtgtacagaaatgcaagagacccgtggagaattgttctccaatgacaccattgacacctaatgggcagtggctgtccatgaaggtaactcaggtaggaggttgaataggggaggctgctcaggttatagtttgtgggtcaatgtgtagaatccggagtcagccactcttggttcaactcccaacaccaccacttcttagctgtgctggcttgagcaagttacttcacctctctgtgcctcaatttctccttttataaaatggaaatgacagcagcacttatctcacgaggttattgtgaaaattaagtgagctgatgtgtgcaaggcacgtagaacagcatggacacattaaagacatgtcagtgttaactataattattattaattatcgtgacgatgccaccaagcttgtggtcatgcctgttttacgggattaatggccaagctctctaacccacacagttccctcggagtgtggctcagagactttggggaggacttagagcccttttctccttgcccgccccaccaatggtttgccccttcccggataattttttttttttttaaacaggatcttgctctgtagcccaggcaggagtgcagtggtgcaatctcagctcattgcaacctctacctcccgggttcaagcaatacttgtcagcttcccaagtacctgggattacaggtgtgcatcacctatgcccggctaatttttttgtatttttagtagggacgggatgtcaccatgttggccaggctggtctcgaacttctagcctcaagggatccaaccccttggcctctcaaagtaccaggattacaggtgtgagccactacacctggtctagaaactctttttttattaagagatagagtctcactctgttgcccaggctggagtgcagtggtaccagcatggctcactgcagactcaaactcctgggctcaagtgatcctcctgcctcagcctctggagtagctgggactacagatgcatgccaccacacccagctaatttttaaattttttgtagagatggggtatcgctctgttgctcaggatgatcttgaactcctgggctcaagcaattctcccacctttgcctcccaaagtgctgcgactacaggcgtgagccactgcacccagcttcagggtcatttttattgtcatccttgtcatcttattactctattgtaccccatgaaatgaaactccatagagtgcaagctgagaacatttttgctcttttctattggaactcagtaaactcacctgttgccttggtctctttgcatgtctcaaactgcaggagacacatttgggggcagtccccatcctctcttctgttgtttgatctctgcagcctcaccacccaccacaccacaccacaccacatcctcacctctgcattcaacggcagacactctcacctgccctcagtcccttcctcctatgaccttcgcatagaccccatcaccaccgttcaggcctccctcaattgccacttcctcagggaggctttttcctgacttccacccaagactaatcaggtgcctgcattttgcatgcattaacatttttaggctgggcgtggtgactcatgcctgtaatcccagcactctgggaggccgaggtgggcagaccacctgaggtcaggagttcgagaccagcctggccaacatggtgaaaccctgtctttgcaaaaatacaaaaagtagccaggtgtggtggtgcatgcctgtaatcccagctacttgggaggctgaggcacgagaattgcttgaacctgggaggcggaggttgcagtgagccgagatcgtgccactgcactccagcctgggagtgcaggacagagcaagactatctcaaaaaaaaaaaaaaatttagctcacactctgggtgcctgcccagatccactgggttcctactgtttctctccacaccaaggggtacttctagcagcttcatctctctgctagggggagaggcggtcttcctccagctgctgaagtgagtgtgacccatacaagggcagatcagcacaatcaacagcccctaagagcagccttcaatcaacagcagcatggaattggtggataaataccccagctccttcgcccctcagctgggacaactccaaagagcatgctctctgctgcctccagaggccctcagtgggactgcaccctatttgtccatggcagtaactggtttcataatgcatgcttaatggttactttcttttccctatttcacttcccatcctctacttgtatctccttgggtcacttcccaaataaactatttgtccttgcattttttaagagatggggtatctgatgcccaggctgaagtgcagtggtgcaataatagctcacggcaggccaggcacaggggctcatgcctgtaatcccaatagtttgggaggccaaggcaggaagatcacttgaacccaggagttcaagaccagcctgggcaacatagcaagacgccacctctacaaaaacaaaaaagtatccaggcatagtggcacatgcccgtagtcctagctactcagcgggctgaggtgggaggatcaattgaagctgggggatctaggctgtagtgagccacgattgtgccactgcactccagcctgggcaacagagtgagaccttgtctcgagaaagaaagaaaagaaggaaagaaggaaagaaaggaaagaaggaaagaaggaaagaaggaaagaaagaaagaaagaaggaaggaaggaaggaaggaaggaaggaaggaaagaaagaaagaaagaaagaaagaaagaaagaaagaaagaaagaaagaaagaaagaaagagaaagaaagaaagaaagaaagaaagaaagaaagaaagaaagaaagaaagaaagaaggaaggaaggaaaggaagaaaggaagaaagaaagagaaagaaagaaagaaagaaagaaagaaagaaagaaagaaagaaagaaagaaaagaaaagaaagaaagaaaaaaagaagctcactgcagcctcaaactccagggcccaagtgattcaactaccttattctcctgagtagctgggacgacaggcacagaccaccatgcccagctagtttttgtatcttttgtagagatggggtcttgctatgctgcccaggctggcctcaaactcctgacctcaagtgatccttccacctcagcctcccaaagtgctgggattacaggcgtgagccattttgcctgacctccttgaacttttgtatcaaaagacagtcatttgccctattgtaattcattccataattgcagttattggttgtcttgccccactgggatgagtcatgtccaccacagtgttccaaaaacacgcacatggtagtagatgcttgataaatgactctgggtctcatgactgggaggtggctgggatgctgatgggctgttctctttcccccatcctgtccttagaagcccccagttggagaggttgtagtgcaggagggaagctcactcctgagctataaatggcagcctccacctgcctcatgctccagaatacacagcctgaacagctggggcagggcccccagcgtccgggaaccccaaatgaccctcccggccctgaccagggctcctggggtgttccctggagctcatgcccagaggggatgtaagtccattaccaaggctgcagacgacacactaaagatgctgatggggtcatgcagctagtcctagcgccattcctagcctgtgtctcccctcctccgcatcagactccacctctgggagctccctttgcaagaaaccgtaccagggacaagggtcttccctacaaggccatgaagcacgcagatatctcctgcgggaggaatctctttccgaggtcggtggtgtcaggcctggaattagccacaccacctgcggcgaggctggtcccagggtctctggggacacagcgggggacagcaggggtggagaggacatcaggactgacctctgatgactcagcctgagatagtgaagagaatgagaaatggtgggcatggaggcctggttgtggcagagcggggtgggtgagggagtcttaggacttcttgccagctcggtcctagagtcagctgggccactcacaagctgggtgactgtgggtgagtcactctgggcctcagtttccctatttgtaacacagggaggggcttataaccgcagctcattcctggagttcattgtaaaggcaaaggggcctacgttgcagctgcctcacctggctggatggcctctgacatagagggccagcctcaatttcctcctctgtaaaaatgggaataaaaggccaggcacagtggctcatgcctgtaaacccagcactttaggaggcaaaggtgggtggatcacatgaggtcaggagttggagtccagcctgaccaacatagcaaaaccccgtctctgctaaaaatacaaaaatttagccaggggtggtggcaggcacctgtagtcccagctactcgggaggctgagacaggagaatcacttgaacttgggaggcagaggttgcagtgagccaagatcatgccactgcactccagcttgggtgacagagcaagactctgtctcaaaaaaaaagaggggaataaaaacagtgcccccccctccagcttatggctcaaagtgggatctgtgagtcatctgctaggcttagtccatgaacagcatttcttcattatccacccagggtcctttcatcatgactgacgtccctcgagatgcaattattctggtctgcttttgtcacaggacgaaactgtctgtgtagcatgggggaggggtgggataagggaggaggatgaagaacggagttggggaggggtctgggcttggcccccttaactccggaacacagggagaagtcaatgtctttagcgcatgaaagaagttctagaatgttctatttgctaccttttcagcccctgcaccaacaggggtgaagttttcaccatgacaaagagaaggaagctggcttaatgaacagtgaggcagctgggagggggcagagggaagctggacactcttggcccgaacctacagtccccagtggcactgaccactacccatctcttccacgatcctgtttcctctacagccttgggcagaaaacaaggaggcctccctacctccacttcatcccacacaggagtcttgatgctgggtgggagtccaggagtctgtctaggaatccaggaaggcttcctagaggaggagccattgcatctgggccttgaaggatgaatagaagtttcctaggcagcgaagtgtgtgtgtgtgtgtgtgtgtgtgtgtgtgtgtgtttcattttaacaaacactttcctatcttctaggggccaggtactcagaagaccacagacaagacccagccccatggcctgccccaaagagttcacatctcataaatgatgcttgaataataacaataatagtaacagctcccacatgctgagtgtgcgctgctaggacacagcatgtgacaggaattcagtgcctgaatgaatgagccaataaattaaactttctctttaaaaaaaaaaattctttttgttttattcttttagctctactatctaaggaaggaaaaagctttctggagtcagcaaatcctgcccttgattgctggaggggagaacggaggcatagtagggtcaaggagatggacggcacaaaggcctgggggtgggaaaactggagtacaggggtccagtgtggagagagttgggggcagagtcttaagcggggagctaaggcactaaggccgtctcctgttctttgggaactggggagccacaccttgattcccagcacaagagggaggaaaggaagacctgagatctagagaggacagcaggagcctgccctgggctccaagagtttcagagatggcccagatcagttgattgagtggccttctccctgtcatgagccacaagcagtagaagccacaggggggcagaagagatggagagatggagagagacacagcgacagtcaccagaagagagacaggggcatggcagaaagaggtgggagaaatccaggaaggctccctgggggtggtggccggaaatagggtggaggcctaatccctgatactagagaggcaggacctagaggggaggagaaagcttgatgctaggcaggaagtccaaaagtctgtctaggaatccaggacggcttcctgaaggaggggccattggatctgggccttgaaagataaatagacgtttcctacatttcctaggcagagaaaagtgtgtgtgtgggcggtgggggaggggggaaacggggaattgctcattttacttaacaagtactttcccatttttaggggaccaggtactcagtgggccacagacaagaccaaggcagaaaagacaggcgcctccccacattgcagcaccgggaccccgagcccacccacagccctcttcattcctcccaacgatggatggggaaactgaggcagcccagagcagcccccaccctaggtcctgcccgggacacgcccacgcgggacctgtgtcaccaggttaaaaatggaaacagctaggaccttttttttttcttcctttaagaaaatcctaggtccaaataaggcgagggctgccgggagcacggtgagctggccaagtcctcctgagcaagcgagtggcggctggcccggccggcctgggcttgggcctcctccaagactcgcctggcaggagggcggaggcaccccgggaggctataaggccctctcctccaccctgccaggctcactctgccccacagccacagcccctgactgccgcagcccccacagagcccgccgcgcaccccacgtcccccacgccagcgcccagccatggaggccatcaagaagaaaatgcagatgctgaagttggacaaggagaatgccatcgaccgcgcggagcaggcggaggcggataagaaagccgctgaggacaagtgcaagcaggtgaggtgccctccgctgggccgctccgggctgctgggagtcctctctgtgcggaaggccggggtctggagcccagttgggggtcgcagacacctgcgggaggataggaggctgatgctttggcggaggaagagcgaggggaccattgccttccttggatggggtcctgggctggaagaggggtgacgatcggacccacccccagcagggccagtgcgaacaaagtgagtttgacagagagagagttggcgggggagggagagtgagaacgttcgtgagcgaggtgtcgtttgcgctgggaggttgtgtactagatagggcggttggggacatgctgtgtgtgtgtatttgcgtgtgtttgagcgtatgtgtgtgtacgtgtgtgtgtacgtgtgtgcgtgtttgcctctggtgtgtgtgtgcatgtgtgcgtgtgtgtgtgtgtgtgtgtgtgtttgagacagagtctcgctctgtggcccaggctggagtgcagtggcccaatctcggatcactgcaacctccgcctcctgcgttcaggcgattctcctgcctcagcctccgagtagctgggattacaggcacccaccatcacacccggctaattttgtatttttagtagagaccggatttcgccatgttggccggactggtctcaaactcctgacctcaagtgatccgcccgcgtctgcctcccaaagtgctgggattacaggcatgagccactgcgcccggccatttgtgtgtgtttgagcaattctctgtgtgtgtgcgtgagcatttctgtgtgtgtctgtgtgtgtatctgcatgtttgagcatttgtgtctgtgtgtacatgtattgtgtatgtttgagcgtgtgtctgtgtgtatctatgtgtttaagcatttctgcacatgtctgtgtgtgtacacatatttgtgtgtttgagcaattctctgtgcgtgtatctgtatgtgtttaagcatttctgcgtgtgtgtgtacacatatttgtgtgtgtgagagcagttctgtgtgtgtgtgagtgtatctgtgtgtgtttgagcctttctgtgtgtgcacatgtgttgtatgtgtctgttttacgtgtctatctgtacatgcacatatgtttcagctgaaaagagtgcggaggggtaaaggtgactgtgagaatgagtgtgtactaggagagctgtgtgtgggacgctgcgtgcggctgttggaaagtaggtgtgaaagagtgtgggtgtgtttgtgagcctgtgtgtagatggtgggggtctgtgagggtagcgggacaggctgactgtgtgtgtgcttgagcaaacgctggtatgacagtgattgaaagtacatgttgatgtggctatgtttgtgttggcatctgtgtatcagggtgatgggtttctgatggcgtgtgtgtgtgcacccacgcacatgtttggatgtgtgtttctgttgtgtgtattggtgactgtgcttctgttggggtgtgtgtgcatgtttagatgagtgtgtgtttctgttggtgtgtttatgtgtatgagtgtgtttctgttggtgtgtgtgaatgtgtatggatgagtgtgtgtttctgatggggtgtgtgtatggttgtgtgtttctattggtgtgtatgtgtgtggatgagtgtgtgtttctattggtgtgtgtgtatgagtgtgtgtttctgttggtgtgtatgtgtgtgaatgagtgtgtgtttctattggtgtgtgaatgtgtatggatgagtgtgtgtttctgatggggtgtgtgtatgattgtgtgtttctattggtgtgtatgtgtgttgtgtgtggatgagtgtgtgtttctattggtgtgtgtgtttctattggtgtgtgtggatgaatgtgtgtttctgttgctgtgtgtgtgtgggtgagtgtgtgtttctgttggtgtgtgtgtggatgagtgtgtgtttctgttggggtgtgtgtgtggataagtgtgtgtttttatggggttgcgtgtatgagtgtgtttctattggggggtgtgtgcatgtgtggatgagtgtgtgtttcgattggtgtgtgtgtgaatgagtgtgtgtttctgtcggggtgagtgtgtgtgtcagtgactgtttctgctggcgtgtgcatatggatgtgaggggggctgtgcgaacctgtgtgtgcgtgtaggtgacactatgcccctggatcaggaagcctccactgtgacagaagcccgctgtctcatgggcacctgcccaggagaatggcacggcatgtgtgtgtgtgtgtgtggtgggggcccagggctgtgacctgctgcaggggtgactgggtggggtctggggactgggatgggagtagagttgagagtgagtctgagaatctcattgtgtatgtgggggtgtccctgctaaaagcctggaggccggggcaggtgggctgcccgtggtggacggaggagagggaggccatttcccatctcctggcagccaagagcccacacagacccagaactttggagacaagagtcctgggaaccctggcaatgagaatgcattggagttccaaggccgtggccatggtttggggcagagcagacaggagcagtgggtgggaggaaggaagggagtcccctcccacagagccatgttccccacaatgtttatccacaccccgatgtcaactgccaagccctggggagcatccaggtctccgataaaccctgggagatgcctaggaccatggcaccgagtgcccagccccacccaggccaggagccaggccagcccggcagctaaaggcgaaagctcggagctcagactggccatgtttgagtcatggctcagtcgctaggtgtcccggacgcctgcatgagtgagatacggaagtgacagtagggcctcccttgccaccccatgacaggattagaggtgactgtacaggtggaacccttggcccggagcctagctcagagtaagcactcaataaatgtaggttgatttcctgccccgccctacttcccctttgggcctccccagccccccgtgccccagggctgccctaagagtatgtggcacattcgtgcaggccaagccccaccccagtgttccctgccacaagctctctccgccttctctgtgcccctccctggcaaacacagacattcatcctgtgctgggccagcttctagccatcatttagccctcaccatgagggacttagccagagattcggagagaaacaagtttatagcactaattcttactaaggtgtgagtggctatctcccaggacagccacaagttcaaaaaggaagaatcctcaaagcctccagccagctgcgtggccaaggaggttatgccttttttgtcccacaaagatgcccactggagtagacttgggctcaaagcaagtctacacagactagctttcaggcaaacctccatagactagcacatactttgtgtatatcagtctttaaatgtatttttattttttagagatgggggtctcactctgttgcccaggctggagtgcagtggtgcaatcacagcttactgcagcctcaaactcctagggctcaagcgatcctcccacctcagcctccccagtggaggtgcacacctccacgcccagctagttattttatttttagtagagacagggtctcactattgcccaggctagtcttgaactcctgggctcaagtgatccttccacctcaacctcccaaagtgctgggatcacagacttgagccacggagcctggtctttgtgactctcctagcttcatgactgaggacacgttcctgcacatttctgagccctcagtgtcctcatctgtgaaatgggaacacgtgaggccttctgaagttcaggtgtggaactcaagatcccagaattccgaagcagaagccagcgccccacaggagctaacggccagtcctgctggggaatagaggcacttagagcgcctgacgctgcaggaggccagagagagcagctctcgggccagcctgatcccagcagccaagcactgatttctggccctgcttacccagtgtgggaaaaggacaaagaggcccagcccggccgcttcctgcccactcccctcccagggcagcaacatcctccaccactggcctttgaccccacatcctgcctcagccctgccccaaggccccatttgcagggactaaggtaatcctatgacagatagggaaactgaggctcacagagggacaatgacgggcacgcgccaccaggcccggctaatttttgtatttttagtaaagacggggtttcaccatgttggtctggctggtctcaaactcctgacctcgtgatccgcccgcctcggcctcccgtagtgctggaattacaggcgtgagccactgcgcccagctctcatttattttttatcctcactgcctaccactgaagggtttggggttgtgtcttcgattcatcccaaacacttcctacagtgttctaatgctggggcccatagtggcctcagtcccagaactgaccctcaagaaactccaagctgagggagacagaccatgaatacctccagctcagaggtcagggccggaccagagggagggacagaggctgggacagctgtaggcgtggcgaaagctctgctcagggcagcagagcaggccaccagggttggggagccttgggactgagcatggagggacggtagatgccctcccagtgaaaagtagaaagtcattcttagcagtgggtccagcatggtctagaagtcaagcaaaccagctttggaatcagactaacaaagattcaaatcccccatctgtgtggcatcaggcaagtcccttcccctttcagagactcagtttgcccttctgtagtatggggcttccctgagacaatatttgtaacacgccctggccaggcatagtggctcacacctgtaatcccagcacttcaggaggctgaggtgggggatcacctgaggtcaggagttcgagaccagcctggcaaaaccctgtctctacaaaaaatacaaaaattaactgggcttggtggcatgagcctgtaatcccagctactagggaggttgaggcaggagaagcacttgagccagggaggtggaagttgcagtgagctgagatccagccactacactccagcctaggcaacagagcaagactctgtctcaaaaaatatatcaaaacaaattgtaacacgcccaacacattctaaatgccagatagccccctgtcggccttatccctgtcctcacatgttcttgcccaaacatttcccccaaaaaagtagtcaaaaccccaaaccaaacaaaaaaaccccaaaccagccaggtggggtggctcatgcctgttgtcccagctactcgggaggctgaagtgggaggatcccttgagcccaggagttcgagaccagcctggataacacagcgagatcctatctcaaaaaaacaaaaacaaaaacaaaacaaaacacccaaaccatcttcataccctgatgagtccatgctgtcagatttgctctcactcttcctacatgttaggagagtcctgtgttgggcacacagttggcacccaataaatgctgtgatccacagatctggaaggaagtcaggtggatgctgtaggtcagggttgacctatgaaacgtctttaaggaaactggctcattttctcagtcaaggcagaagttcaaaagcagctgccggaatgctcagagaccagcatgtcaaggtttctgttctgcagatggagaatctgaggccagaaaaggggacgggggtcgcagagcttggatttggagtcaggcttccaggctccccacccggaggtcaaggtcaggccctatagactctgaccctgccctgatcagctggccaccctggattgggccctgtcatctccccatagcttgggatgctcctgaggacttcagacaggatagccctccctgctctctgtcacatctcagctagagacccttgcaggtcacctcagtgacatcagctgaacctccagctgccagcctccaccccatcctccagctgacacccagcaggccgcaagatgggaagcctggagttcacactttccagctactcaggaggctgaggcgggaggatcgcttgagccgaggaggtcaaggctgcagtaagctatgatcacaccactgcactccagcctgggagacacaggaagaccatgtaaaaaaaaaaaaaaaaaaaaaacgcaaaaaaaaaaaataatgcacacacacacacagcaagatcaggttaaaaaaaaaaaaggcaaaaaaaaaacatacacacacacacacatatggggcacctggtacattttgcacatccactcaggggtgagcacgtagcccagacaggattcagagctcagtctagaagccacgggcacagcagcttttttaacataccctcttcaagaaaaaaaagaagagaagcaagtcagagagggaggaagggaagctggcctagtgtgaggaacagggccaagggctttgtctttgtcagctcaggcagttataacaaaacaccatagactgggtagcttcagtaatagacatttattgtttacagtctggaggctagatgtccaagatcaagatgctggcagattaaatgtctggtgagcgctctctagctagcttgcagacagccaccttcttgctgtgtcctcacattggaagaggataaccaagttctggcctcttctcataagggccttaatcccatcatggtgggtcaaccctcatgacctcacccaaacctcatcatcttccaaaggccccatcaccaattaccatcacatggagatgagggcttcaacacatgaattggagagggggcaaaagcaagcattcagttcattataggcttatattccagaagacctgggctcaaaccctgtgctgtgtgacctggggaaagtcatcccacctctctgagcctcctgctgtggggaggaagcaggagaatgaagctgggctcagtgggggctgtctgcccaccctgggagcaggaacaagatcagtgtcaaaccatctaaggcaaaagtcagatccaagccaggtgtggcgactcacgcctgcaatcccagcaatttgggaggccgaggcgggcagatcacttgaggtcaggagtttgagacctgcctggccaatattgcaaaaccctgtctctactgaaaatacaaaaattagtcagtcgtggtggtgtgcacctgtagtaccagctaccggggaggttgaggcaggagaatcacttgaacccaggaggcggaggttgcagtgagctgagatcgtgccactgcactccagccttggtgacagagcgagactctcaaaaaaaaaagtcagatccaggcatgagctggatatgatcaccctaatccagagttgggggcccagggagggagtttcagcctggaggtgacagaaaagtcttcttgagccaactctagaccggtgtggtggggggtgacaaagagaggtgatggggtctgtggtttgtaatccataggcctgagcttctcaaactaggagtgatgggaggataggactcttgggataaacagaggactgaaaatttagggaaagtaggggacatttttattaaaatgaacatggcctatatgcaaaaattttaaagatttaacccgagccttcaaagaaagtgatcctgtaggggcgagtctcttctagccaagctccccaaagcccagaaatgagggactaggtctgagcccttcagcccttcagagtattttggtaagacagtctaagaaccactgccttgggccatagggagccatagcaggttctaggcagaaagagggcaggcgtatttgttagaaagtttctctgaccccgtgttggggtcagaaccagagggagaaaggctggggacagggatgggcggagggatccacgcgcagagaatgagattgcttaactccagatcatggtgaggctgcacctctgaaactggaatgtgtgtatttctggaaaacatttggagtcttcagtttcccaaaagctgccattgatctccctagagtactggggaccccaataagcccaaaacagctggtcctcaggacgagggaaagatgtgaaaatcccactatcaggtagcatggatggcgtggtgcatgctatcgcaacccctgttctacagataaggaaactgatgcccagagagagacggaggactcttgtgaatattgggggggaccgcccctgcacctcggggacgtgaccccccccccaggctgacccgttcctcgctctgtcgtccccaggtggaggaggagctgacgcacctccagaagaaactaaaagggacagaggacgagctggataaatattccgaggacctgaaggacgcgcaggagaagctggagctcacggagaagaaggcctccgacgtacgtgtgcagggatgcgggagcccgcggcggggccaggccggagccccggggccgggaaggcggggagagccgcagggggaggaggaagaggaggaggagaaggcggcgcctcccagcgctttctccaaataagtcccgaaaaggggcactttccagcagctgtggccagcggtgccgacgtcaggccctcccccagcggtgctgacgtcggcggtccggccgggtgacctcatcgccccgacggcagccggcccggggggcggggagaggcgggggcggcccccgcgcaggcaaaggcttggggggccggggcgcggctgtgcagctctcgccggagccgagcccagccgagcgtccgccgctgcccgtgcgcctctgcgcctccgcgccatggccggcctcaactccctggaggcggtgaaacgcaagatccaggccctgcagcagcaggcggacgaggcggaagaccgcgcgcagggcctgcagcgggagctggacggcgagcgcgagcggcgcgagaaagtgagcgccccggcctcgggccccgcacccgcagcctcctcccccgcgcgccctcctttcttcccggcttcccgcgctgcccgcccgcgcgcagtcctcgggccgcctttttacgccctcggacgccgatcgccgacccacatccctgcgcccgcagccaggaccccctacttcctccgccgtcctccttcctgggcctgggacaggggagggggcgccgcctccgggtcgggcggggccggccaagcgggaaatggggggatggggcggagggggtgagcgatctccgggtggagaagtggagcggcgggagggggcgtatcgtgcaggctccgactccggggctggcgccggggtcccgggccgaggggaacccgcgaccggacttgtgggggagaatgaggatgaaaacgtggagcttccattgtctagggtttgaccggccgacagggatttcgacgggggaccggggatctggggagggggtcgcactttctcgcctctttcgcggcttcccggcttctgcttgcttccctgaccgttcccaggggcgcggcggcgacgtgtctgctccaggcggcgggggggatggggggtggaggaagttcagccccaagccgcccgcctttctccagctgattcctgcgggaaccggggcggcgggaccctgcctctctccagaaggccccgggaacgctggcgcggggccctgaacccacgatcgtttgagcgcctgctgtgcgcctccgccgcgagtcgcagggcccgagataaacaatgggtctgaaaaaggagggagtttcaccatcctctctgcatcatcctcctggctgtccctcgggacagatggtggcaccgccagggtctggggacagatttggattctggtcccatatcatgccacccacaggcttcatgacttggtatttgctctctaggagcttttttcccatctgcgagtaggactgataagaatcccgaccccccagagtagcagggagggtcccaggagtaaatctcaggcgtggagcctggcgctttgtaaataatcaattgtgttgttgttttttgttgttttgtttttgaggcagtctcactctgtcgcccaggctggagtgcagtggtgcgatctcggctcgctgcaacctccaccccccgagttcaagagattctcctgcttcagcctcccgagtagctgggattacaggtgcccgccaccacgcccagctaatttttttttttttattttggatttttagtagagacagtgtctcaccatgctggccaggctggtctcgaactcctgacctcgtgatctgcccaccttggcctcccaaagttctgggattacaagcgtgagccacggcgcccagcctcaattgtgttttctctgccctgggaagagctcatagacaaatggaggcaggggagctgactcactgatggagcgaggtctgcattccacgggttttctgtgcagttatgggagcatgacaggggaggctccaaaatggaggttgagctgggtcttatagaataaataagtttgctgggaccagagacatgggtgtgcacagactcagaggcaagaaagttgtatgatgagggtgggggggtgtgcggatagaggttgaagcccaaaagccctgaaagttcagtgttgaggctcagggtggggaccctagagaggcaaaagatgcccagccagatggaattggtggtgtgaattgccaggactggaaagagcccagatgggggctgcagcatgggccttggttgaagcctctaatcctgtaagggctgctttggcccaagaggccttagaaacccggtgtaagcctcaatcggtagccggtctggcctctttctcacacttaaccgacacagctcttgctctgatctcatcccaagtcatctcgctggaggacaattaactcggcttcaaaatggccctcagcctggagccaagatttaggagcaagaccgtctagttgggagagaagatgtttttggagagttgaagacttcttgaaaaagttcgaaaagttcttgaaaaagcaaaggatgcttctttccgtctgggagagggaaaacctctcccagggcaaaaggaactaagaccaggggtgggttaaaaaaaaaaaaaaaaaaacctttcactcttgtagaataagccaggagccggcgtgtggtagacttctgggcctgtttcccgacagctggtttcgtttagatttttgtgtgattaactgacatcttcctgttcctttgccacatgtatctagcaagcctcttttaccttataagggaaatcctttgtagcgtgtggaaggctttgattgcaggaaggggtggaacccaaaatgactcggccgtgactagcagtttttcaaaaatacatatatatgtatgcatgtacagatatgcgtgtatctcccaactccagacagctgaaaatctgccaaaagcgttgtttgccaggattcagaatttcccacataagggctactcacttcttaaaagacaactcatgaatcaagcacctctgtttgatctttaaaatcaattcctcgactgctaatgggtacacagttttttgtttgtttgtttgtctttggcgggttatgaaaatgtcctggaattcgataatggtgttggttgcagagtgtttttgcaacatcagttcctggcccagttactgaaggtggtaggaggagttaagatctaggcaattaaaaagaatgaaaggcacccattcatgggaaggcctcagtgacgtttcttaagacagtttcatcagtggttttcacaattctctgcatttggtgtttcagaggacactgcaatacgaaacacctgtgggagtgccctctttctgcttctaggaatctgaggctgagaaaccttcctgactctatttgtgtagtttttcggccacgttagcctcattctatttttttttcccccagtatgaactcagggcaggagagggagtggtttcctaataattttttttttttgagacggaatcttgctctgttacccaggctggagtgcagtggcgcgatctcggctcattgcaaccttcacctcccgggttcaagcgattctcctgcctcagcctcccaagtagctgggattacaggcgcctgcccccacacccaactgatttttttgtatttttagtagagatgcggtttcaccatgttggccaggctggtctcgaactcctgacctcatgtgatccacccacctccgcctcccaaagtgttaggattacggatgtgagccaccgcgcccggccttcctaataattttgatagccttccccagttcagggattcttcatttgttctgataggaaaaagctagcgtggcttcccttttcctctcggttgaggcccgtttgacccgttctcaatattccttccaaagagcaggcatcgctggaaaactcgccttgcctcgtagccctggcaggacctaggggacaggttctgacaaggaagagccctgggtgggtcttaagaggccattcatttcttaccaattctgagtcactgaataaaaccacttcccccagtggggcccctcggtttcttcacctgtaaaatgggtgcgatgtgtgaggatgaaattgcagtaaaataaaaccgtggcagtaagagatgcctttctctggcacatcccacctgctgggcataagcggcgccaccctctggagttacagcctcaaggcagtccggtaactaatcaggctttgggatggagagggccaggatgaggaagcaaccttcccaacaccacgtggctgtgaaaatgacaaagcacggtcgggcgcagtggctcacgcctgtaatcccagtactttgggagaccaaggcgggtggatcacgtgaggccaggagtttgagaccagcctgaccaacaagacgaaaccctgtctctactaaaaatacaaaaaaatagcaaggcgtggtggtgtccgtctgtaatcccagctactcaggaggctgaggcagaattgcttgaacccgggaggtagaagttgcagcaagccgagatcatgccattgcactccagccttggtgacggcgcaagactccatctcaaaaaaaaaattaaaaagaaaatgacaaagcggggattccagcccagcactttttggccctggagttcctggtttaatgcttcccattgtacttcctttcttgtaggtaaaaacaccttgaaaagccaataacactattggggtatgtcttccatgcctgcaaccaagttttctttccctttccatatctttttgtcctgccatctctcagccaggcggattgaaggatggaattccaacgaggctcccccgcctcgtcccaccttggtaattgcatggccaacatttaactgagggctccatagtcttgcatttatcttgccattcaggtgaatgggagcggaactcacaggacacaatgagccgggtcactgatggccttgctttctaagaatctcacagtgagccctagaactctctacgtggtaacactgtgtgcctttttcagagaagagcctatcttagatcttagcctaacgttgggtctattgtgttgctggagagaccagcactgacattcatctcaaagcacatggtatgtttgactcctatgttgactcaactacccatcttgtactgggacactcgctttttttttttttttttgagacggagtcttgctctgtcaccaggctggagtgcagtggcacgatctcagctcacggcaacctccgcctcccgggttcaagtgattcttctgcctcagcctcctgagcatgtggaactacaggcacgtgccaccacactcagctaatttttctatttttagtagagacagggtttcaccacgttggccaggatggtctcgatctcttgaccttgtgatacacccacctcagcctcccaaagtgctgggattacaggcatgagccaccacgcttggcgatgctcatcttttgctatggagtggtagatgtttttcccagacattttccgggaagatcatactgaaattttggtatgagtgtaaattccctatggcctggactcctgggtgggctttgacggggaagatcaggttaacagagggcaggacatgggggaggctcccactggtggctggcctgatacttcttaacatggctgcacctccgacctccccaggctgaaggtgatgtggccgccctcaaccgacgcatccagctcgttgaggaggagttggacagggctcaggaacgactggccacggccctgcagaagctggaggaggcagaaaaagctgcagatgagagtgagaggtaaggacgctttgaatctggtggcatccgtgtttgcttttagaaaatggggatcatgctgccgacctcgcagagctggtgtgaaagtaaacaaggtcacaaggacatgcatgtgtccacaaaaaagtgcatgacagcactttgtaaaccatcactccatgggtagagatgtttatccgtggccaggcacggtggctcatgcctgtaatcccagcactttgggaggccaaggcggacggatcacctgaggttgggagtttgagaccagcctggccaacatggtgaaaccccgtctttcctaaaagtacaaaaaaattagcctgccatggtggcgggcacctgtaatcccagctactcaggaggctgaggcaagagaatctcttgaacccaggaggcagaggctgcagtgagccgagatcgtgccattgcactccagcctgggcaacaagagcaaaactccatctcaaaataaagtgaggggtgtttatccttacggtaaccatgaaaagaaacttccgacagacagaaaggcaaacagaacgggcagatgtgagactgcaagtatgactgtccatggtggtcagtttgcaaagcactgcttctcgtattttctctgaaagccacagtgcctcttagtgttctctagacaccaaatttcaggtaggccggatgcagtgattcctgcctgtgctcccagcactttgggaggcagaggcgggcaaatcgcctgagctcaggagttcaagaccaactggggcaatgtggtgagaccctgtctctacaaaaaatacaaaaattagccgggtgtggtggtgcacgcctgtactcctggctactcaagaggctgaggtgggaggatcacttgaccccaagagtttgaagctgcagtgaggcaagattgtgccactgcactccagcctcagtgacagatgagattctgtctcaaaaaaaaaaaaaaaaaaaaaaaagcagagtactgtggagaggaggaaaggaaacttgggatgcacaggtgattgttagcagagctgtcaggctttaggcttttggacggtgacagctatttcagggacagttgcaaaccagcatggttaatgtacttgcaactgaccatgcaccaggtgccgtggctcacgcctataatcccagcactttgcgatgacgaggcgggtggatcaactgaggtcaggtgtttgagaccagactggccaacatggtgaaaccccgtctctattaaaaatacacaaattagctgggcgtggtggcgggcacctgtaatcccacctactcaggaggctaaggcaagatcccccagcttgaacccaggaggcagagggtgcagtgagccaagatcgcaccactgcactccagcctgggcaacagagtgagactctgtctcaaaaagaaactgaccacgttcctcacccgcccatggtatctgtgctgcaacccagccaccagtagggtgccttctcctcggtagccagatcattctctggcacgccttggcacaggctctctggaagactgagggtagattgtgtaattcacagaagcagcagtctgtgtgtggtggaaaaggagttccttgtgtggcaatggtgtgggcccgaccagtgatcatcgcgtctgcccctcattcacaccggagttctcacttgagccagccaccatgcttttgcagtataaacacctcccaaagattcatttctttttttttttttttttttgagacagggtcttactctatcacccaggctggaatgtagtggtgcgatcacagctcactgcagcctcgacctcctgggctcaagcgatcctcccgccacggcctccagagttccagagtaaagctgggactacaggcgcatgccatcatgcccagctaatttttttttgagacagagtctcgctctgtcgcccaggctggagtgcactggcgtgatctcagctcactacaagcttcacctcctgggttcacgacattctcctgcctcagcctcccaagtagctgggactacaggcacccgccaccacacccggctaatttttttgtatttttagtagagacagggtttcaccgtgttagccacgatgttctcaagctcctgaccttgtaatccacctgccttggcctcccaaagtgctggcacgcctagctaatttaagatgcatttctggttgtgctgctgtgaccactaaccagagattagaaaccagctaaggaatcttggagattgcatgtcacccaagctggaaatttcttcccaagtagtggaacagccagggcagagggaacagacgctactgcagactctgcttcagccactgaatcaagggagagagtggcagctccggcagccacggggcagtggaaggacccagtcacgagagttcctggctgtgcctgtggcctgggttagctgctgttcacagtcagaccagcctggctggatgctgacgttgagggctcccatattggcaaaccaagggaggctgcgaaggccagtctcttgtttgcaccatgtccccagaggcctttggtgacacccctgttaaagactgctgtgtctcagtagaaagaattatatacttgaagcttggggatctagagtcagcttctaccactggcactttctatggagccttaggcaagtcactttgatctcttgggtactacaaggggttttggggcaataaataacccagagagcttgctcacatgctgagggtgagacctcgtacaggtgggggagggtgttttgagacttagctgagaacgggtgacaccccacgtgaacatatttattggacagcaagaagcatatggtctctgtgctgggtgggaatgatacatatcaatgacacattatcccaggctggcctcttcttttcttttcttttcttgttttaaatacacaaggtcttggcagggtgcggtggctcacacctgtaatcccagccctttgggaggcgggcggatcgcttgagcccaggagtttgagaccagcctgcgcaacatagtgagaccccatctctacaaaaaaatattaaaaattagccaggcatggtagtgcatgctggtagtcccagccactcaagggactgaggtgggagaatcacctgatcccaggaaggcaaggttgcagtgagctatgattacaccactacactccagcctgggcaacagagtgagaacctgtctcaagaaaaaaaataaataaatacacaacgtcttgctctgtcacccaggctggagagcagtggtgcaatcacgactcaccgcagccttgaactcctgggctcaagcgatcctcctacctcagcaacattgcaaaacccccacctccacaaaaaatttttttttagtttagctgggtgcagtggtgcacacctatagtcccagctactcaggaggccgaggcaacaggattgcttgagcctgagaggacaaggctgccgtgagctctcagggcaccactgcactccaacctgggcaacagagtgagacaccatctctcaaaataaaagaaaaagaaagggggcacagactctggagtcagactgccaagggctgagcctcagctctaccacttaccagctctgtaaccttaagttacttaccctctctctatgccttagtttcttcatttgtaaaatgtggataatttacctgctccatagggcagttgtgaaagtgaaggcacttagaaaagtgcctggtagtaaagatgaagggaggctgggcgcggtggctcacacctgtaatcccagcactctgggaggtcaaggcgggcagatcacttgaggtcaggagttccagaccagcctggccaacatggcgaaaccccctctctactaaaaatataaaagttagccggtcacggtggtgcatgcctatagtcccggctatgctggaggctgagacaggagaattgcttgaacccaggagatggaggctgcagtgagctgagatcacactactgcactccagcctgggtgacagagcgagactccatctcaaaaaaaaaaaaaaaaaccaagatgaaggaaatgtgtgcacagagttccatctttgcagtgtgttacagtgctcagtagattcagagactcatttagatgagagatgggactaggggtggtgtctcacgcaattagccagacatggtgacgggtgcctgtaattccagctactcaggaggctgaggcaggagaatcgcttgaacccgggaggtggaggttgcagtgagctgagatcgtgccactgcactccagcctggatgacagagcgagactccatctgaaagaaaagatagatgagaggtgggtggaggggtgtgagtgaacggccgtcctgatgagattgctccttgcagaggaatgaaggtgatagaaaaccgggccatgaaggatgaggagaagatggagattcaggagatgcagctcaaagaggccaagcacattgcggaagaggctgaccgcaaatacgaggaggtgagtggggctggcagatggcgcagcagcaggaagtgggaggaaatgcatctgctgagatagggaggacaccggggccaacgaaaggaagctctcggttaggtcagctgtcctcctgcgtgaacatatgtttgtccagagacaaccacttggctaggaaactatctcccacgatgccagaaagtgctgcggacgcttgtctaacgtaatgggaaaaccgaatgatcagctcacttgtgtcgttagctgggagttttggcacagttgggcaaaaatggaggattgtggtcccaagccatggagtttcagaccatgcaagctcaggccctcctttgcctccctcgatggctcggctcttccctcccgcctcttgtctgcctcgctcctcaggcttgaggaagagaatcaggatttcctccaggccccaggatggctctttcagttgaagcgccagcaaaaggccaggcgcggtggctcgtacctgtaaccccagcacttcgaccgaggcgggaggatcacctgaggccaggagtttgagaccagcctgggcaacatagtgagaccccatttctaaaaataataataataataattagctgggtgtggtggcatgcacctgtagtcccagctacttgggaggctgaggcaggaggatcgcttgaacctgggaagtcaaggctgcagtgagctctgaccacgccactgcactccagccttggagacagagcaagaccctctgtcaaaaacataaaagggctgggcatggtggctcacgccggtaatcccagcactttgggaggccaaggcaggcagatcacctgaggtcaggagttcatgaccagcctggccaacgtggtgaaaccctgtctctacaaaaaatacaaaaattagccgggcatggtcgtgcatgcctgtaagcccagctatttggaaggctgagacaggagattcacttgaacccaggaggcagaggttgcagtgagtcaaggttgagccactgcatttcagcctgggtgatggagcgagactctgtctcaaaagaataaaaaaataaaaaagaggccaggtgtggtggctcatgcctataatcccagcactctgggaggccgaggtaggtggatcaggaggtcaggaattcgagaccagcctggccactacggtgaaaccccatctcgactgaaaatacaaaaattagctgggcgtggtggcacgcgcctgtagtcccagctacttggaaggctgaggcaggagaatcgcttgaacccaggaggtggaggttgcagtgagccgagactgtgccactgcactccagcctgggcaacagagggagactccgtccccctgcaaaaaaaagaaacaccagaaaaacccatgttgcagctggtctaggggtctgggtggggcatcattgggggctgtctgcagtggatgggagaggacacggctggtggggatcgggctcagctgggcctttctgtctctgcaggtagctcgtaagctggtcatcctggagggtgagctggagagggcagaggagcgtgcggaggtgtctgaactgtgagtggcagaacaggactgagcgaggctggctcgattcctggggcggagtgggaaggagctggctgtgttgggaattggctctgaccggggtctctgctcaagtggacgggcgtcaggggctcatggctcatcttttctcttggcttctgtgacaaagaggtggtgacttgttcttactgccatgggaagcactgcccacgtgttgaccctttctgcaaagatatgaggaaataggagtgagacaggaggcagcagggaagcccagaagtcccattttcccagagaggatatctcagggggctgtgccatcttaacagaacactgacctgctccagaaggcaggctcccccggtcagtatgtaaatgcttttgctcctgtcagtgtttggccgtgacacattcctggcgggaaggtgagaagcttaaccagaatcccacaagcaagcaccgaaaaacaaaacacctgtcctcttggccccgggtgaggaattcagccccacagagcatccgggagtgctgagagagatctggtttcacaaatccactccgggcttccttcccggagtgtcccctgcaaactcccattgctctctgcccgccttctgccctcagtcccattcttacaccttccggagtcggcctcatcaatcatagatttcacaagtccttgcagccttacccttggcaaaagaccaggagtgttttccaagccctccaaatactcttcgggcgcacctcgcctctgcctggtatgataagcctttgataagcccatagtatcacactgcagaaaaatccattaacattttctccccacattccttctgccccccaccgggggagctgtgtaggtttctcctttggaaaatttattgttggggcgattgctattattgccggctgtaagggaagataagacacaaaaatcctttgtctttgtgcagaaaatgtggtgacctggaagaagaactcaagaatgttactaacaatctgaaatctctggaggctgcatctgaaaaggtaggtggttggcttgagctggagggtggcttgctggactttgttcttttcttctcccgagggatgcaggagcctgtcaggttatggggaatctgccctttatttaacagtagcgttggtgcctggcagccagggtttttcccctacagaaagagctggatttctcctgcacactcttgagtcctcttccatggggtctgagcaccatctttgatctccatctcaggaggatagagatagaacatgaggctcttcttagcgagatctgagcatagttgtataaataaatacagagcctgcctctcacctgattcccctggttcctccagaaataccatctcaaaggtatagcaatgatcagaggtggaattgggctttttagtttgaaacagcacccaaagcagttgctacgtggcagctacgtcgggaacaaaggacacacttccacggccgaaccccactgaatttcccagcctcttcctcattcttgctcctgcttttgcagtttcacagacattctttgttctcccatcacctccaccccccacttttttttttttttttttgagacagagcttcgctctgttgcccaggctggaattcagtggcatgatcatagttcattgcagccttgaactcccaggctcaagcgatcctcccacctcagccaccacctgctattcactcaactgggtgtggctttccttttgcttgataaacccctattcagcctttttttttcttttctttttttttgagacagggtctcactctgtcacccaggctggagtgaagtggcgtgatctcagcttactgcagccttcgactcccaagttcaagcaattctcccacctcagcctcccgattacacgctaatttttataatttttggtagagatgaggtttcaccacattggccaggctggtctcgaactcctgatctcaagtgatctgcccgcctcgccctcccaaagtgctgggattacaggcatgacccactgcacctggcctagagatgagatcttgctctgttgcttaggctggaagtgtagtggcgtgatcatagctcactgcaggccccaaactcctgggcttaaataatcctatcacctcagcttcctgagtagctaggacttgcaggcatgtgccactactccaaaactgtatttttttttttttttttatagagcacagtctatgttgcctaggctggtcttaaactcctggcctcaagtgatcctcccaccttagcctcccaaagtgctgggattacaggcgtgggccaccgtgcctggctaatttttctagtttttggtagagacaaggtttcatcatgttggccaggctggtcttgaactcctggcctcaagtgatcctcccaccttggcctcccaaagtgctgggattactttgggaggccgccgagcctggcctcctgttcatcctttgagcttctgcttaaacatcacttctgagagtccttctctgatttctcatctaggttaggtatttctctgctgtgtagccctgtctatacttttgctggcattatgatttcttacatttattatagttactccattaattgcatgccttccttgctagattgtaagttgtaaggacaggaaccatgtcatcttgttcagagttgtgtccctagtactagcattgtgcctggcatatatctgtagtgtgtgtgtgtaattttttttttttttttttttttagtagagatggtgtttcaccatgttgcccaggctgatctcaaactcctggcctcgagtgatccacctgcctctgtctcccatatgtgccagccctggcatatatctgatactaggatgtgtaaggaatgaatccagttggtgtgtgtatgccagacactgccccgggccagggggatagatgtaacaccactaatacctcagctgctttgttttgttttgttttgagatggagccttgctctgtcgcccaggctggagtgcagaggcacgatctcagctcactgcaacctccacctcctaggctcaagcaattctcctgcctcagcctcctgagtaactgggaatacaggcgcacacaccacgcccagctaatttttgtatttttagtagagacggagtttcaccatgttggccaggctcgtctcaaactcctgacctcaagtgatccacccacctcggcctcccaaagggctgggattacaggtgtgagccactgtgcccagcctggcatctgctcttgaagagctcagagtcgagtctagtggaagggattgacaaagtcacagagtgctttgggaatacaatagagggaccttggtaggttgtgaacggtgtcaccaaggaggcgacatttaaaacagctgtaggtccagcacggtggctcatgcctgtaattccagcactttaggaagccgaggcgggaggatcgcttgagctcagaagttcgagaccagcctgggcaacatggagagatcccgtctctaccaaaaatacaaaaactagctgggcatggtggtgcatgcttgtgatcctagctacttgggaggctgaggtgagaggatcacttgagcctggagggcggaggttgcattgagccaagattgccccactgcactccagagtcaggcttcagtcatgacttgatcacttaatagccatgtgaccctaggcaaaataataacttcacctttctgtgaccctttcctcccctataaaatgggattacagataccaggctgtgatgccattaactatgtctggcccatggtaagcagctaataagtgttagttattattgggaggccgaggcaggcggatcacctgaggtcaggagttcgagagcagcctggctggccatcgtagcgaaaccccatctctgctaaaaataacaaaaattagctgggcatggtggtgggcgcctgtaggcccagctacttgggaggctgagtcaggggaattgcttcagcctgggaggcagaagttgcaagtcacagtgagccgagatcgtaccactgcactccagcctgggtgacagagcaagattctgtctgaaaaaaaaaaaaaagaaaagaaaagtataatttctgatgggtcatcatggggaggggaacattccatgctaaggggtgcattcatggacagggactgggactcaggagtccacagattatgatcagggagtgcctgtcaccctggggaaggtggtggagaatggggttggaaatacagagggggccttgagtaacagattcccagttatctccctttcttcgccatactttttatctcaagttctcagtttaggccttctgatcaataccatcctacaggactctccccaacatcctccacatttcacacatatttcttctgctggggaaaggtgcctgcctctactctgcctacttttttttttttttctttttgagatggagtctcactccatcgccccaggctggagtgcggtggcgccatctggcctcactacagcctccacctcctgggtttaagcaattctcatgccttagcctcctgagtagctgagattacaggcacccaccaccacacctggctaatttttgtatttttagtaaagacagcgtttcgccatgttggccaggctggtctcgaactcctgacctcaagcgatccacccgccttggcctcccagagtactgggattacaggcgtgagccaccgtgcctggcctgcttacttctttttatgcttcttcctccttttttttgagatggggtcctgccctgttgcccaggctagagtgtagtggtccaatcagagctctctgcagccttgaattccagggttcaagccatcttccctcctcagcgtccccattagctgggactacaggtgctcaccaccatgactggctaatttttaaattctttgtagagacggggtctcactatgtgacccaggttggtctcaaattcctgggctcaagtaattctcccaccatggtcccccaaaacactggaatcacaggtgagagccaccacacccagccctccttttctttctttctgttttttttttgtttttgttgttgttgttgtttgtttttttgagatggagtcttactctgtcacccaggctggagtgcagtggcgtgatctcggctcactgcaacctccacctcccaggttcgagtgagtcttctgcctcatcctccccagtagctgggactacagctgcatgccaccaagcctggctaatttttgtatttttagtagagacggggtttcaccatgttggccaggctggtctcgaactcctgaccttgtgatccaccagcctcaggctcccaaagtgccaggattccaggcatgagccaccatgcctggctgggcctccttttcttaaagcagtgttttggtttctcccacagtattctgaaaaggaggacaaatatgaagaagaaattaaacttctgtctgacaaactgaaagaggtgagtgtggtggcacccagcgagctctggtttctcctggggctggtcttgaagccatgatagtaactcctttcttcttatctaggctgagacccgtgctgaatttgcagagagaacggttgcaaaactggaaaagacaattgatgacctggaaggtatgaggttaccatctaaatgtttgccttgccctgccttcccctctgggacacatccacggacagttggggaatgtttgtggaggggctgggttgggctttgtttgccttaggaaagtaaagcgcatagtgatgtcatatctggatgtcctggaacactggaataggataatgcaaagcattcaggcttgaatggcccttttttttttttttttttttttctatgagacggagtctggctctgtctcccaggctggatggagtgcagtggcgccatctcggctcactgcaacctgcgcctcccgggttcaagtgattctcctgcctcagcctcccaggtagctgggactacaggcgtgtgccgccacacctggctaattgaattgccactttcaggaggtaaaatatctctgcttagttagtcccatgagcaagtatagagaaaagagtatggctctctctgattaaaaaaatattaataataaattaaaaatctcaggccaggcgcagtggctcaagcctgtaatcctagcactttgggaggccgaggcgggcggatcacttgaaatcaggagtttgagactaacctggccaacatggtgaaaccccgtctctaccaaaaatagaaaaaattagccaggcgtggtggtgcacgcctgtaatcctagctactggggaggctgaggcagggagaatcccttgaacctgggaggcggaggttgcagtaagccaagatcacgccacagctctccagcctgggtgacagagccagactccgtctcaaaaaaaaaaaaacttcacaatttccttctgtttgctcatttctgatagatgccttgcattttttttttacatgccttgcatttttgcagaagctctgtcccagggagctcaaagcttatcatagtatttaaaaaaaaaaacagaaatacagaaagtgtagggactgcaataaagactagtctgcaagtctggggcccacttctcccagaattttttcaagagttccagtgtttaacattcggcctcagaaattccagaatcttggggttcaaatggaatcttccaaactgcccatcccacccagaaaggacacattcttcagaccatatcttccaatgtttttttggggaagtgaggttcccatataagggaaaatgccccattccaaaatacgacctttggacagggtgacgtcattggaaatccgaaataaactgaggggtggggaccagtggggggaagctctgtcacttctggttaccactgttttgaagcttcattgtggctaatccccctgcagaacctcaaaccacttagagatcaactccatagatctttggttttcttcatctgtttcacatggaacacagctttctcctagtctgtgctttgtttgctcacgtgtttttttcttcctcttgtggttcatctgtggcactccattccgacccttgccttctgtcccctgtacttctgaactgtctccctggggacctccgccctctagatgagttatacgctcagaagctcaagtacaaagctatcagcgaggaactggaccacgctctcaacgacatgacctctctctgagaggcagccaggtcgctgccctctgtccttctcacatggtgcctcctacgcccctgtgggcttctaggagctccggtggcctgccttctggtttgaacgtcagagccttcttctgatgtgtctgtgactctacaaccgaaataaagacgggcagtcctcctcttcatgccccctcattctcattttctccacttgctgcctttgagctgtagctgtgtgcccttaaccatagcctgaaacacaaagtgggtggttagcctctctcactcacaaatgaaaagcttattacaaaaagaaaattatgcctacaggatgcttttctgaagacgtgaaaacaaaagcaaactgggcatgtgctctcagataccgctgttagctaacggcatctgcatgccaataatttttttttgtttttttgttttgagacagggtcttgctttgtcacccaggctggagtgcagtgacaccatcatagttcactgcaacctccacctacaaggctcaagctatcctcccacctcgacctcccaagtagctggaactacaggtgtgcaccaccacacaaggctaatttttgtactttttttttttttttttgaggcggagtctcactatgtcgcccaggctggagtgcagtggtgcaatctcggctcactgcaacctccgcctcccgggttcaagcaattctcctgcctcagcctcccaagtagctgagattacaggcatacaccaccacacctggctaatttttcttttggatttttagtagagacagggtttcaccatgttggtcaggctggtctcaaactcctgaccttgtgatccgcctgccttggcctcccaaagtgcagggattacaggcttgagccatcacgcctggccatttttgtactttttgtagaagcgggagggtttcactatgttgcccaggctggtcttgaactgctgggctcaggcagtctgcccacctcaccctcccagggtgctgcaattacaggcatgagccaccgcgcccatccccaatggtttttccttaaatagaaattgttgtgaatggaggctcatccttgtaaaccgcttaggcagcttaagagtcaacagggatttggaaaaaccagcaagcctgtgtcaaaaatgaggctccccttgaatggggcttgagctacagattcaaacagcggcagtgacattttgatctccatttcctccttttcttgtgtcttttctctgtgttacactgtgagtgtggtgactggggcttcccgtggctttactcttcactgttcatccagctcccagtcctgggaggaagttcacctccacgccctgcccttagaaaactgactgtacaaggagtgaacgggcctccatgaacagggaaagtgctgtgacgtcagaagacgtgaatttagaattcttttcccgaattccagaattgcctgagactgctaacatcaatctccattcatatttcagttagttataacaggaaccttgctttagtttagaatagctcttaaggttgacctgtgggtaataaaaggtcatgctttttcctacatgaggaatatggagaaaacaaggtcactcttttttttttttttttttttttttttttttttttcaagacagggtctcactctgttgcccgggctggagtgcagtggcgccatcttggctcactgcaacctccgcctcctgggttcaagtgattctcatgcctcagcctcccgagtagctgggattacagtcgcggaccaccacactcagctaatttttgtactttcagtagagatggggtttcaccatgttagctaggctggtctgaaactcctggcctcaactgatccgcccacctcagcttccaaaaatgctgggattacaggcgtgagccactttgcccggcccaggctatgctttgcttttttttttcttctttctttttgagacggagtttcgctcttgttgcccacgctggagtgcagtggcgccatctctgctcactgcaacctctgcctcacgggttcaagcaattctcctgcctcagcctcccaagtagctgggactacaggcatgcgccaccatgcctggctaattttgtatttttagtagagacagggtttcaccatgttggccaggctggttttgaacccctgacctcaggtgatccacccgcctcggcctcccaaagtgctgggattacaggtgtgagccactgcacctggcccaagctatgcttttctaatgatcaaaaacataccaatttgtcccaaaatttcaaatagtgcatctggttctcccctgcatcctaccaccactaccacctcaaattatcacagataattgacatttagatgttcaagccacatcttccagactaccccttgaacctggaaatggcatgaaaatctccaactagatcctgaattttcggtatccattgttattcctcatcctatttttttgtccaggtgggaagctctgtccccattactctctctattcatccattcctccaaaatgcacctcccctaaaccacctccacctttccaccctcagcctctccctgctcctaactgccgtccatcctgaacttctgcaaaaaccattcccctcacacattgccatatatatgcccttggaaagattacagactgtgtagggggctggtttttgtttggagtctgtgtgtttgtccctggaatttctccaggcatttctggactccaccctttgaagtaactatgcagcctgtctatccagttattctacctaactaagcacataagtggaatttcagagattagtgctatggccgggcacggtggctcacgcctgtaatcccaacactttgggaggccaaggcaggcaggtcacttgaggtcagaagttcaggaccaacctggtcaacatggtgaaactctgtctctactaaaaatgcaaaaattagccgggcatggtcatgggggcctgtaatcccagctactggggaggctgaggtgggaaaatcaatcacttgaacctgggaggcggagcttgctgtgagccaaggtcgaacctttgtactccagcctgggcgacagagtgagactccgcctcaaaaaaaaagaaaagaaaagaaaagagattagcactatggaggtctacactatctgttgatagtctgtgagccttgtcgtgattctcaagggcagttaacactttcagggaaagtcattttatctcagacctaataacaaaatagatgctaaagcatctgagtgacaagatgaagcgaagtcaggatttgtagtcaagagaccagggtttaaggcctggcgcagtggctcacacttgtaatcccagcactttgggaggccaaggcaggcggatcacttgagctcaggagtttgagaccaatctgggcaatatggcaagaccccatctctaaaattattcataataatattttatttttaaaaaattttttaataaaataataaataaagagaccaggatttaaaatcctagctctactactttaaccatgccaacgtgaacaagctgcttaggttttctgcaaaataaaggtgatatctctgttatgaggattaaatgagataatggagaaactggctcgtccaacatagtcagcattcagttaacatctattcacccagactggataggcccaggtcactgatctgtctgatagaatcctcccaggtcatagtcacttgactctgtgtgtgtgtgtgtgtgtgtgtgtgtgtgatggagtcccactctgtcacccaggctggagggcagtgacgcaatctcggctcactgcagtgtccgcctcccgggttcaagtgattctcctgcctcagcctcctgtgtagctgggattacaggtgtgcgccaccacacccggctaattttttgtatttttaagtagagatggggtttcgccatgttggccaggctggtctcgaactccttacatcaaggatccatggtgtctcatgccagtaatcccagcactttgggaggccgaggtgggtggattgcatgagaccagcttgggcaacatggcgaaaccccatctctactaaaaatacaagaattggctgggtgtagtggcacgcacttgtagtcccagctacttgggaggctgaggtagaaggatcacttgagcccaggaggtcaaggctgcagtgagctatgatcatgccactgcactccagcctgggcaacagagcaagaccctgtttaaaaataaataaataagaaaggctgccatcttctgcagtcatttttttctttctgtaaatttccaggctgatgatatcacattttatgaggcattttgctttcccccagcattttaatgagtcttggccttgtcccttatcagccatcacttactgcaaactaagttctctctcgtgctctgtcacgcatagctctaaatggcgtcttttttctctctctctttcttttttaatttaaattgtttcatcagctcagttacttaataacatgcctgtagaatggcttaaatttcgcatttacctggggtttgtctccgttctcctggattcatagacagttacacaattatgtgtataatttaaacagccattcccagaagctccgaaggaaagatgggttacaggattttagatttaactatcaaaggctcaggggctaattaactagcacttgggtggaaatttatattaagtcacacatatctaggactgaaatcttcatgtagcagcacgtcataggttctgaagtatttctcctttattcctcatcataacccccacaccacgcattgatatcgttacccccatttgacagacggggaaaacagacctaggaaggttagatgcttacttaagtgatacaactggagcttaagttcaggtattctgactcaagggttaccagagttcacaaggaaaaatacaggacaccaacttaaatctgagtttcagataagcaatgaataattttttaatcataagtatatctcttgcataagtacatctcatgcaacatttgggatatacttacactaaaatattatttgtggtttatctgaaattcaatttaactgggcgccctgcattttatcttacaactgtgactcccaaatttggtgcttgttccttagtattctgtgatgttctgctgtaattaaaaatacaaagtactggacaggcatggtggctataacccacctgtattcccagcactttgggaggctgagcagatgggttccttgagcccaggagctcaagaccagcctgggtaacatggtgagaccctgtctctagaaaaaatgcaaaaattggccaggtggtggcatgcacctgcagtcccagctatgcgggaggctgaggtgggaggatcacctgagcccagggaggtcaaggctacggtgattcgtgattacgccactgcacttcagcctggacaacagagtgagaccctgtctcaaaaaaaaagtactttctctcttgtgactttcaccctggcagtttcaggtttagaaatctttgggggggtgctgggcatggtggctcacacctgtaatcccagcactttaggaggccaaggtgggtggatcacttgaggtcaagagctcgagaccagcctggctaacatggtgaaaccccatctctactaaaaatacaaaaattagccgggtggtggtggcacgcgtctgtaatcccagctactcgggaggctgaggcaggagaattgcttgagcctggcaggtgaaggttgcagtgagccaagatcgcgccactgcactccagcctgggtgacagaatgagaccctgtctcaagaagaagaaaaaaaaacaaatctttttttttctttcatttaacaaagacgcttattaatttatctttccccatactcttaatcctcaccagagaaacttgcccaggccaaagaagagaacgtgggcttacatcagacactggatcagacactaaacgaacttaactgtatataagcaaaacagaagagtcttgttccaacagaaactctggagctccgtgggtctttctcttctcttgtaagaagttccttttgttattgccatcttcgctttgctggaaatgtcaagcaaattatgaatacatgaccaaatattttgtatcggagaagctttgagcaccagttaaatctcattccttccctttttttttcaaatggcaccagctttttcagctctcttattttttccttaagtagcatttattcctaaggtaggcagggtatttcctagtaagcatactttcttaagacggaggccatttggttcctgggagaataggcagccccacactttgaagaatacagaccccagtatctagtcgtggatataattaaaacgctgaagaccataaccttttgggtcaactgttggtcaaactataggagagaccagggaccatcacatgggtagggattttccatccagagccaataaaaggactggtgggggccgggggtggctattgtgggaagtcataacccacagatagatcaacctaagaatcctggcccttctccactctccaccatgcaggacaaacatcttctcaagcagtcaacgtagaatgcttgggaaatagtcataattacccacatatagtaattaatagatggtaattaattgatccttgatgtgatgttcttttgcatatttccttcattctaaagttgttccctggccgggagcgttggctttcgcctgtaatcccaacactttgggaggccaggacagatcacttgaggtcaggagttcgagaccagcccagccaacatggcgaaaccatgtctctactaaaaatacaaaaattatggtgacgcctgcctgtagtcccagctactcgggaggctgaggcaggaggatcgcttgaacccaggaagtggagactgcagtgagccgatatcgcaccacagcgctccagcctggtcgacagagtgagactccatctcaagaaaaaataaaaataaagttgttctctgaagagcaaatgtctcattccagtaatgacccactcagcaggaatatggtggagttcagtccaattcaggtcagccatatccaaaagaccacaagtcattactaagttgagcaaaagagtttttatctattagcagaaagggcctctctggcagcagagattaaaaactggcccaacttcatttccatacttcagggaacagcaaattgaggatttacttatctaggacttgaattccttctttgggaccaagttaataaaagaccaagaaactcctgattaaactggataatgaaggattctgtagacagggctgcacgtatcggctttgtttgacttctcttttctcagttaacatctcagagctagaacattccacattccccagcagcgtgtgggggctgactaaagtttacaattccaactaaaaatcaccctgcttctggcttatctgaatcccttacccaccccaccccaccaccctactcctatttattcagcaccacactacccaggaaatacactagcaaattgtgcaatggaataaaatccacactttagattcttgcaactgtatcatatgtaatagtatcactttttctacattttggtcaaataaatttttacataaactacaatttgcgtgaattttagaatgtgtgggggtacacagagcattttggttcaacaaatgttaaagggatggaaagggaaaataaccagagccaagaatgtagacaaggttatctatttgctttatactgtgacttcatgatacaaggatattacagtctcattgcaggcgagagcactcagcctcggtcactcgaaaactcctggccttccttatcccctacgctgcctaagccaggctgtgaagaatgagtaggattttaagagataaaagcagggaaaatcatctctgttgcctgagttaggaagatctgcctagctaaggctgagttacacatacaaaggaaagcagaccagcatgggcaccatagtgagaccccgtctacaaacaataacaaaaatttggccaggtacagtggccaaattacacctgtaatcccagcactttgggaggccgaggctggcggaccgcttagggccaggagttcaggaccagcctggccaacattgtgaaaccccatctctactaaaaacacaaaaatgagctgggcatggtggtgcacacctataatcccagctacccgggaggcggaggttgcagtgagccgagatcacgccactgcactccagccccggtgacagagcgggactctgtctcaaacacacacacacaaactagtggggtgtggtggcacatgcctataagtcccagctactcgagaggctgaggaagaaggatcgcttgagcccaggaggcagaggatgcagtgagctatgattggcctgtgcactccagcctgggggaccgtctctgagcaagaccctgtctcaaaataagtaaataaataaagcaaagcagaagcagaaaagctggaaggtaggctgagcccacactgatgacagcctgaacttaatttagtcaggagtggagagccactaaagactagaggaggccaggtgcggtggctcacacctgtaatcccagcactttgggaggctgaggcaggtggatcatttgagctcaggagttcaagactggcctgggcaacatggtgaaaccccgtttctactaaaaatacaaaaattagctgggtgcacacctgtaatcccagcactttgggaggctgaggcaggtggatcatttgagctcaggagttcaagactggcctgggcaacatggtgaaaccccgtctctactaaaaatacaaaaattagcgggtgcacacctgtaatcccagctactcaggaggctgaggcaggagaatcacttgaacccaggaggtagaggttgcagtgagctgagatcatgccactgcccttcagcctaggcaacagagcaagactcttgtctccaaaaataaaaaataaagactaaaaagactggaagaggccaggtgcagtggctcccacctgtaatcccagcactttgagaggccgagatgggcagatcacgaggtcaggagattgagaccatcctggctaacagggtgaaaccccatctctactaaaaatacaaaaaattaaccgggcatggtggcacgcacctgtaatcccagctactcgggaggctgaggcaggagaatcgcttgaacccaggaggcggaggttgcagtgagccaagatcacaccactgcactccagactgggccacagagcaagactccacctaaaaaaaaaaaaaaagactggaggaaacaagtcaagcaatacattaggaaaatccacttagcattcatcttcaagaaggtctagcattggggtggactaaggcaggaagcccagttaggaaaaggtttcaataatccagtacaggttgccatggaatacgagggaagaagtgattcgaaggaagtaatcttaaaatttagctcgctggatggcagagaacttagaacagaatgtcaaagaccactacagtttcactacctgaattttgatattttgcctcaagatcttcttttgaggaggggaggcagtgaatcagaaagagaaatgaaagcctttaaaacattaatggagtctgcagacaactttctgttatcgaaaaaataacaagccgggcgctgtggctcacacttgtaatcccagcactttgggaagccaaggtgggcagatcatctgaggtcacagacaggcagatcacctgaggtcaggagttggagaccaccctggccgacatggtgaaaccctgtctctactaaaaatacaaaaattagccaggcgtggtggcacacgtctgtaatcccagctacttgggaggctgagacaggagaattgcttgaacccaagaggcagaggtggcagtgaaccaagattgcgccactgcactccagcttgggcaacagatcaagactctgtctcaaaaataaaataacaggccgggcacggtggctcacgcttgtaatcccagccctttgggaggccaaggcgggcggatcatctgaggttgggagttcgagaccagcctgaccaatatggagaaaccccatctctaccaaaaatacaaaattagccaggtgtggtggcgcatgcctgtgatcccagctactcgggaggctgaggcaggagaatcgcttgaacctgggaggcggaggttgccgtgagctgagatcctgccactgcactccagccttggcaacaagagcaaaactctgtctcaaaaaaaacagcaggcagagacaggggaggataacgagcccagccaggggttcaagacctgcttgggcaatatagcgagatcccattctccaaaaataaattaataaaaaataaataactggctgagcacggtggctgacatctgtaatcccaacattttgggaggccgaggtgggcagatcacttgaattcaggagtttgagaccagcctggccaacatggtgaaaccccgtctccactaaaaatataaaaattagctgagtgtggtagtgggtgcctataatcagctactcaggaggctgaggcaggagaatcatttgaacctgggaggtggaagctgcagtgagctgagatcgcgccactgcaatccagcctgagtgacagactctgtctttaaataaataaataaaataaataaccgaaaatgtagttataataaaagtatacaattaaagcatttcctttaggccaatccaacctttaatgggcactgggctgattcagatggttggtgcagagaatgtgaatgaataaagtcacaccctccaataaaggccctgccatgatttgaccacagttcctcctttgtgtgtctgtttctccctcctccctccccacttgggttgtaatctcatctcgggatgctgttttagtcatgcttatggcctcagcacttcacacttcactgtgttcaacggacctgtcccaacttttggggagttcccaatgccatgaagtatggctggaacacagcatgaggtcagaaccagactgtgagggatttcaaacgctaagaggaagattttggactttatcctgcccagagaccacagatggctattaaaggaagtggtttttttgtttgtttgtttgtttgttttgctttttgagacaggattccactcttgtcacccaggctggagggcagtggcgtgatcatggctcacagcagcctcgacctcctgggctcaagcaatcctcccatctccacctcccgagtagctgggacgacagatgtgtacccagctaatttttgtatttttaatagagacagggtttcgccatgttgcccaggctggtctgaaatgccagacctcaagtaacctggttgcctcagcctccccaagtgctgggattacaggcatgagccaccgtgcccagcctaaagtattttagaataagcacactgcagggtggaatctgggttagagaaaatggtcagggagaccagtggagaaatgtaatgattccactgtggcaatggaaatggaagaatgcaattcaagagctatttgtttttttattttttatttttgagacagagtcttgctctgtcacccaggctggagtgcagtggtgcaatcttggctcattgcaacctccgcctcccggattcaagccattctcctgcatcagcctcctgagtagctggaattacagatgcccaccacacccggctaatttttttaatttttaggaaaaacggggttttaccatgttacccaggctggtctcaaatttctaactcaggtgatccacccacctcggcctcccaaagtgctgggattacaggcatgagccaccgcgcccggccctcaagagctatttagaacctccttaaaaaccagaatgtgacggatgagagatgaaaggcagatgtcaaagacagcttaagtttcactcctaaggaaaatcaggacaagccagtctgggtattggctgatgggttcagttgtgaacatgctgagctaggagtatctgacaaatccaaagggagatgtcctgaacgcaggtggatgtgaagagatggctgggctaaggataaaacactgagaatggtcagcatggattaggagcccccagaaagtgagaacagagacagaacaacgaggaccacaaacactaagggacaggcagaacccacccctcccccacctcaaaaagacttcaatggggtctgaggaaaaaacaaacaaacaaagaaggggaggcagaggcagaggtggtagggagaagaaaccagcaaataaaatagggacagggccgggcacagtggcttatgcctgtgatcccagcactttgaggggatcacttgatgtcaggagttcaagaccagcctggccaacatggtgaaaccctgtctctactaaaaataacaaaaattagccgagcgtggtggcacgtgcctgtaatcccagatactcgggaggctgaggcagaagaatcgcttgaacccggcgggcagaggttgcagtgagccgagatcatgccactttactccggcctgggtgaaagagcgagactccatctcaaaaaaaaaaaaaagggggataggggccaagcgtggtggctcacacctgtaatcccagcactttgggaggccgaagtgggcagatcacctgagctcaggagttcgagaccagcctggccaatgtggtgaaatcccatctctactaaaaatacaaaaattagccagatgtggtggtgggcccctgtaatcccagctacttaggaggctgagacaggagaatcactggaacccgggaggcagaggttgcagtgagctgagatcgtgccactgcactccggcctaggcaacaaagagtgaaactccatctcaaaaaaaaaaataataatggtatagggccaggcatggtggctcatacctgtgatcccagctttttgggaggtggaggctggaggatctcttgagcccaggagtttgagaccagcctgggcaacatagggagaccccatttctacaaaaaataaaaaaattagcctgccatagtagcgtgcagatgtagtcccagctacttgggaggctgaggtgggaggatggcttgagcccaggaattccagaccagcctgggtaacatagcaagaccccatctctacaaaaaataaaaattagccatgcgtggtggtgcatgccagtagttccagctactctggaggctgaggtgggagaatcactggagcctgggaggcggaggttgcagtgagtgaaatcacaccattgctctccagcctgggccacagaacaagaccctgtctcaaaaataagtaaataaatgaggataataccaagaaaaaagaatattcagaggtgatcaagactatcaaataccacagaggctgaggcctgtaggtggtcaatgcctctggttgaagcttttttaaccagagctagattagcagaagaatgagctgaagtggaagggaggaggaaaggctgggccctccttccacagatccttaagtaagcctcaaggccccggaggccccagagtgacctagaacagactggaccatctctaagaagcagggagccctagtgatcaaactgcggcctgggaagcttggcactctgagttcagataccaaattcccacttttaagcaggaagggggaaaagtcacttaacctcctctggcttcagttttctcaccattaaacaggaaaaaaacaataacatcgttttgctgggctggtactgggattaaaattttaagagtcaggggccgggtgcaggggctcacgcctgtaatcccagtactttgggaggtggaggcaggcggatcacgaggtcaggagttcgagaccagcctggccaacacagtgaaaccccatctctactaaaaatacaaaaaaatacaccacaccaggcgtggtggtgggtgcctggaatccaagctacttgggaggctgaggcaggagaatcgcctgaacccgggaggcagaggttgcagtgagccaagatcgcgccattgcactccagccctggtgaccgtgagagactccatctcagaaaaaaaaaaaagtcagggtcttgctccgtcgcccaggctggagtgcaatggtgcgatcacagctcactgctgccttgacctcctgggctcaagggatcctcccaccttagcctcctgagtagctgggactacaagcatacaccaccatacctggctaattttttaaaaaaattttttgttttttgagatggagccttgctctgtcacccaggctggaatgcagtgacacaatctcggctcactgcaacctccgcctcccagattcaagcaattctggtgcctcagccgcctgagtagctgggactacaggcgcacatgaccacacctgcctagtttctgtatttttagcagagatggtgttttaccatgttggccaggctggtctggaactcctgacctcaggtgatccacctgccttggcctcccaaagtgctgggattacaggtgtgaaccacctcgcctggccaaaaaacttttttttttttgcagagatggaggtcttgctatgttgcccaggctggtctccacctcctggcctccaatgaacctccacctcagcctcccaaagtgctgggattacaagcgtgcaccatgacgcccagctaattttatttgttgtagagatggggatctccctatcttgtccgggctggtcttgacctcctaagctcaagcaatcctcctgcctcccaaagtgctgactcccaaagtgctgggattacaggcctgagccaccacacccagctgcaagcccgattttccaaatgtatctctcctctgtttttctctttctttttttttttttttttttttttgagacgtagtctcattctgtcgcccagactggagtgcagtggcgcgatctcggttcactgcaggctccgcctcccgggttcacaccattctcctgcctcagcctcccgagtagctgggactacaggcgcccgccactactcccgggtaattttttgtgtttttagtagagacggggtttcaccgcgttagccaggatggtctcgatctcctgacctcctgatccgcccgcctcggcctcccaaagtgcgggattacaggcctgagccaccgcgcccagcctttttttcttttgatagggtcttgctctgtcgcccaggccgaattgcagtggggcgatcacggcttactgcaccctcaacctcctggcttcccaaagcactgggatcacagacgggagccaacgccccggccagttttttcaacgttgagagccctggcccctagataggacccagcatcctcactgctctaacccctccccccccaccatccccgggctggcccggacaacccctaaggtggccgagggcgggccctgaggaggccggcgcgcgcttccgggcacagcttgtggcggtgaagccgctcagatggcggaggccttgggtatctctaagcagatcgctaggccgcagacctcggagctcgtcttgggtcacttttatttattttttttgagacggagtctctctctgtcgcccacgctgcagtgcaatggcgcgatctcggctcactgcaagctccgcctcccagattcaagcaattctctgcctcagcctcccgagtggctgggattacaggcgcccgccaccacgcccggctaatttttgtatttttagtagaaacggggtttcaccatcttggccaggctggtcttgaactcctgacctcgtgatccacgcgcctcggcttcccaaagtgtgggaattaaaggcgtgaaccaccgcgtccggcttgggtcacttttcgagtatacagctcctcctctctccttcctccctaggcccccactgccccgactcgcaggccgcagacaaggctgagagcgctaccttgctttcccgcgctcgcctcggtgcctactgcgcctgcgcgagctgtgagggcgggacccagagacacccgccccaactactggcgtgcgccctctgctgtcgcctaacggaactccgggcgcgcgtgcgcacgcaccccaagccacgccccgccaggctgccggcgcgcgagcggttggcgccgctccctgccttccctctcctacagtggggcggggccgggccgcccgagtcgggggtggaaggcgggggccacataatgccacgcccccgcctcgtccccatttgaagccccgcgactcttcactgctggtcaatcagagcccgtgctctccctagtgccggccaatgggaggtgcgctcgggctgcttccggctccgcgctccgctcgccccctcccaaggtctccccgcgactggcgggacgcaggggcgggcgtcggccgcggtgacgcgcagcgggcctggagccaataaggggcgggctcggtgctgatggacggtgctggtggccagtggagaggcgctggccgcacttcccgtcggggagagagtgtaatatggcgaagacctacgattacctgttcaagctgctgctgatcggggactcgggggtggggaagacctgtgtcctgttccgcttctccgaggacgccttcaactccacttttatctccaccataggtaacgggaccggggaatggctgggggcgccggaggcccgggctgggcgcgcccctgaggggctggggctgagggatctacagggctggacgggccgagggcgctgagagggtcgagggggcctaaagggagaagagcagtcgcctgcaccgccgttcgggggttcctgggccgtggtgggggagaccaggtgcccattttgcagatagggagactgaggctccgaccctcagcccgctcgttagggcgtgttatgtcttgggctggggtcttcgcgcccgtcctctcgatctgtcctagcagcagccctcgaagcggttcttttgaggctcttgccttacagaagtggaaactgagtcatggggaattggccatgggaaaaagacagtggcatctcaccttaatgagcatttactatgtgccaagtgcttcacgtgcattttcacactcttcagttcttggtgttaagtgctgttatgagcccgtctgacaagatgaggaatctgaggctcagggagggcatggaacttgcccaaggccacacagtctgcacgtggtgagaatgggatttgatggaatttgaacctggctgtgtctcaacccaaaactcgaggcttagctctcctagagagatgccactgcacactcccagctgatgacaagctcagctaatgcaccttggagccgggactctaacccacaccattcctgctcttttctctggagcgttcagaggttgagcccctctccctgaccatgcttcccctcataagcgtattttcctctagaaggaatgataagaagagtcaggaccttttccctgcccacctttcatcctgctccaggaatgacagcaatggcaagtgacagcactgcctgccctgggacctgtcatccccaagaagatgcaagataaaagcctcagcgagaaactaaatcagccactgccacagacagccttgacttccctatcaaagggcccaagactccagctgtcactttagaacagcttttcctgtagggccagcccacattgtggttgaacagaattggcttggtgcatctcagttgtgatgtccacagaagtggagctgacctctctcagtgccacaaaagcagtcctggcccacaatgaaaaggtttgacccaggagtaacacctatttgagtggcttgtgagctctgtagccctgctagggatggggaaagtgggggaacggtcactaagtccaggagtttattccgactcaagaaaacctagggaatggcctttgctttactgtgtcactttgacagaatcgtgttatctccctgaaccccaagataatgtgctaattccattcttgccctcctccaggagctatgctttatttattttattttattttattttttgagacggagtctagctcttttgcccaggctggaatccagcggcaggatctcgggtcactacaacctctgcctcccgggttcaagcaattctcctgcctcagcctccctagtagctgggattataggcacccgccaccacgtccagctaatttttgtatttttagtaaatacagggtttcactgtgttggtcaggctggtctcgaactcctgaccttgtgatctgcctgccttggcatcccaaagtgctgggattacaagcatgagccaccgcacccagcggagctgtgctttataaaacagttatatgccagatgtaaaatagagagaattgactggaaatcattacgtctggtttccagttgctgtttgcccttgaatgtgcactacccctctctgagccctgctgtctttagagcaggagtgacactgtctgcccagcctagtgccctggtggttgaggattagaattagacaataaggggttgtcaccacaaccagaggctatctagaggaagcaaatgaatggctcctgcagtgacagcatccagcctctgaagacagatgtttctgaattcttccccctcccccactccaaggctaaactttagggtaattcttgtgctccaaccaatcaagaagtggcgttaattcagcctgggcaacatggcaaaccccatctctacaaaaaataaaataaaatcagccgggcacagtggctcacccatgtagacccagccacttgggaggccaaggtgggaggatcgattgagcccaggaggtcaaggtgcagtgagctgtgatggtgtcactgcactccagcctgggcaacagagcgagaccctgtcttaaaaaataataataaaaataaaagaaagaaagaaatgatgttaactgtgagcagactggcttgcattcactcagatcccagtttcccagccttccccacaaacccccctctttttttttttttttttttgagacagtctctctttgtcacccagtctggagtgcagtggcgcgatctcggctcactgcaacttccacctcccaggttccagcgattctcctgtctcagcctcccaagtagctgggattacaagcacctgccaccatgcccagctaatttttgtatttttttttttttttttttagtagagatggggtttcaccatgttggccaggctggtctcgaactcctgacctcgtgaccgcccaccttggcctcccaaagtgctgggattacaagcatgagccaccgcgcccagcccaacccccctctttagagttactttgagctttaaagaggctttcttccatttgcagatgaggatgtgacttggtgaaagttacctagcaaggtggaggtggcacctgaccctaagatccctccctcccaccccttcattcccctccttccatttgtagccttctgtcttctaggaaagtctaattcaccatgaccttgaaggtcagacctcataattcttaggcctcataaagtttacacttcctaattaaatttggcatgttaataaaacccagaggagtgtagggcggagtgctgctgtggagcttggccaacctaacagtgctcctcgattttttgtgtccctgtacacgtgtgacaggaaatggggaatgttttaggaagcccaggcacactgggctgtctagtcctgaagcagtatcaccttaatgcttaaaggtgattccataaattagccatacgtggtggcgcttgcctgtattcccagctactcaggaggctgaggcaggagaatcgcttgaatccaggaggcagaggttgcagtgagccaagattgtgccagtgcactccagcctgggcaacagagcaaaactctgtctccaaaaaaaaaaagaagcaattctatattggctgagtgtacctctgggttttctttatagacaaggattgagtggctattcattttctgccactcaatccttaacattttgccaaaagttacatttcatcaaagcctattctcagaagccccatagatcatttgtggtgtgaacttggccctgtagctccctggaatgggttctcaccagcctggctcggcgccactgcctcctcaggggcccattgattcctccagtgaaagggttggcatttgagaaagtgctttgtgaaccgctcaacaccgcgtagaccctgttgcgctttaatactttgatccagccatattttgccagtgtcttctgtgggccaggcagccattttggcaagagggctgcagaaaggacacaggtgagtcaaggtgcgtgcaggactggggtaccagcttctagcaaatgtgtattcaacccctgtgtgttcagtcactggaggtaatagcagtggatgagacttgtcagttccctgccccagggagcttacgtttgagagggcgaaagtccagtgctggggctggatggatggaattagcatccccaccctgggttcagagaggcccagccaggcctgggcctcaagtcttccccagcaggcacttgaacaaactcctggtggcaaaggctgggtctggctgtttctcatctacatgggccattatgatctgcaagcattatgcccaggtccatgcagcagatacatacatgtatgtcagttatgttaataaataggtaaagggagaactgatgaggatggtcagaaaggttcccctgaggagggaacttgaatgggaacctgaacaaagggatagccaggtagctacagaagaaagaactttccagggcagggaagagcaaacatcaaagccccgagtcaggagcatgcttggaatgttgaggaaatcgctgtgtggatggtgtggccagagagagcaggtcatgagccagagtgctgagaggtgaccaggttaggcaggaccttgacacacatgagcagctgtttccactttattcgagggaagtggggcagggaagccactgaaagaggctttaaaaaaaaatagctttatgagatagaattcgcatacagttcacccatttgcagtgtacaattcagtggctttgggtacattcacagagttccacaaccatcaccacaggcaatttgggaacatttttattatgccaaaaagacaccaacccaaggccaggcacgcacggtggcacagtggctcacgcctgtaatcccagtactttgggaggctgaggtgggcagatcacgaggtcaagagatcgagaacagcctggccaacatggtgaaaccctgtctctactaaaaatagaaaaattagctgggcatggtggcgcgtgccggcagtcccagctacttgggaggctgtggcaggagaatcacttgaacccgggaggcagaggttgcagtgagccaagattgcaccactgcactccaggctagccaagatcgcaccactgcactccaggctagccaagatcgcaccactgcactccagcctggtgacagagaaactccatctcaaaaaaaaaaaaaaaaaggataccaacccttccagtttccccatgtgcccccccagccccagacaactgctaatcagctttctgtttctatgaatgagcctatgctggacatgtctgttaatggaatctcacactaagtgacctttagtgtctggcttctctcagcatcctgtcttcaaggttcatccacattgtatagcatggatgagtactccgttcctttttatgactgggtcatattctgttgtatggttggaccacattttgttcatccattcatctgttggtggacatactagaaagtttggagcagagggccgggtgcggtggctgatgcctataatcccagcactttgggaggctgaggcaggcagatcatttgaggtcaggagtttgagaccagcctggccaacacggtgaaaccccatctctactaaaaactcaaaaattggccgggcattgtggcaggcacctgtggtcccagctactcgggaggctgaggcaggagaatcacttgaacctgggagacagaggctgcagtgagccaagattgtgccactgcactccagcctgggcgacagagcgagactccatctcaaaaaaaaaaaaagaaagtaagtttggagcagaggttagctgtgtaacatggttagggttatatttttgaaggctggggaggggactgcgggtgaacagtgggagcctggggaacatcaaggtggctgcgaggtcaccgtggggaaaggggatgaaagcgggaggtgagagacaaggaagatggggtcaggaaggcttgttaggaggtgatcttcaagggggccttaaaggaggagaagtgtgcctagctgacgggccagtgggacacagaccacccgcagaaaatgaatagcatgtacaaaagctgggggcaggagagaacgtgaccatgtgcattgacgcatggtggggcctaaggccctgtgtgcctgggggttggtcagctgcagggtgttggggagcaagggactcaggcctgcagagggctctgttgagacccactccgtacaactgcctggggtggggaggcgggttcagctggcagcaagggacaagagcagggctttgccacccgcgccccctgggtttgctctgcactgctcccatcagctcttggagagggaaaatatctccaagtgtttccagatctggatattccgacatcctgcatgcccagcaccaggcagggtctccgtaagccacaacagctgtcacctgcacaggttggtggcgcccagctcagacacaacttgggaaatgggctgacagtgacgtgccttttttcttttttctttcaggaattgactttaaaattaggaccatagagctcgatggcaagagaattaaactgcagatatggtaagagtcattgttctctgtcattctctccacctggcaatggcttcaagccagaagcccttggccttctccctccaccgtccctgtgaccttggcctccatttcttggtgcccagtcctggcacatggggctttctccagaagctcctggaggtttatacccagcccagagagctgtcctctgctggctgcagggcaccagggcctacagcatcataggcacaaagctgcccagccctggctagctcagtgttccacagtgggcaccatctgggtctggccttcagagtgggctgcttctgttgaacgggaagagagccctctcagtgccaggtgctggtgacgcctgcagggactgtgagatgccccagccgagagtttccttttgagcctctcaacccactcagaagcataaaggtccaacttcacttcctcttttctcccctggggcaggcctggcctcccttcctagcgtacagaccgaaaccccaaaccgaaattaagcggagggccgggccccatgttgagacctgtttccattcctgagaactaagggtgacttcccatgcacatacaattagggaagtggggagactccaagtcgccatcgctggcctgattctagtttgctgagactgagttcaggtggcgggtatagtggggtcctgccctgcacacatgccactcgcacagagtcactggccctgagcaaaacaaagagaagtcacatttaagagcatggtgcaatttccctgtcacccaaaccaggcaagtgcctttgagtgggagcagtgtgccaggagatgggccacgaagtcatcctccctcaagtctcaaagtttgaccggtcacccccacttgccagtttcagggagccccacagctacccttgactccaggtgctattcacctcttctttttttttcttctttttttgagacggagtttcgctcttgtcgcctaggctggagtgcaatggcgcgatcttgtctcaccgcaacctctgccccccgggttcaagtgattctcctgcctcagcctcccaagtagctggtattacaggcatgcaccaccacgcccaactaattttgtatttttagtagagacggggtttctccatgttggtcaggctggtctccaactcccgacctcaggtgacccacccacctcggcctcccaaagtgctgggattataggcgtgagccaccacgcccggccctactgttcacctcttaatctgactttgggagtcgggtaggtttaacttgcagttcatcctgcagacattggtagtaagtcaagctctggctgccttgtaagttccaagccatggaagtttctccacttccagcacgttggtgccatgtcaccctttgttcccaagtccaaagtgacactgcatcagcaagcagaagtttcactttcctcctgccttcctgcttctgctcttagcaatcgtggtgaggttagtgactcaaaactcttctaaggactgtagttgaaaaaaaaatgactggtttttttttttgtttctttgtttttttgagacagagttttgctcttgttgcccaggctggagtgcagtggcacgattttggctcactgcaacctccgcctcctgggttcaggcaattcttctgcctcggcctcccaagtagctgggattacaggtgcctgccaccacgctcggctaattttgtatttttagtagagacggggtttcgccatgttggccaggttggcttcgaacccctgaattcaggtgatccacccgcctcggcctcccaaagtgctggaattacaggcgtgagccaccgcacctggcaaaaatgactgtttttaaccactcatgtctcctgctgctggtgtcagaaagtcagcttagctccaagcaaggtgtttctgcacaatccagacgtatagagccctccgggtcccagcagggccgtgggaggaaccctgggcttggagacaaaagacctgagtcttgccctggctctgtcaccaatcagttaggtcacctttaatttttttttttttttttttgacaaagtctcactctgtcacccaggctggagtgcagtggcatgatctcagctcactgcaacctccacttccttggttcaagcaattctcgtgcttcagcttcccgagtagctgggattacaggcacctgccaccatgcctggctaacttttgtatttttagtagacagggtttcaccatgttggtcaggctgatctcaaactcctgacctcaggtgatctgctggcctcagcctcccaaagtgctgagattacgggagtgagccaacacgcctggcttttttttttttttttcctgagacagagtcttactctgtcacccatgctggaatatagcggcacgatctcaggtcactgcaacctccacctcccaggttcaagcgattgttgtgtctcggcctcctaagtagctgggactacagatccacgccatcatgcccgcctaatttttgtatttttagtagagatgaggtttcattgtgttggtcaggccggtctcgaactcctggcctcaggtgatccacccgcctcggcctcttaaagtgctgggattacagatgtaagccactgcaccaggccagttaggttaccttttttttttttgagacggagtcttgctctgtcacccaggctggagtacagtggtgcaatctcggctcactgcagcctccacctcctgggttccagcagttctcctgcctcagcctcccaggtagctgggattacaggcacgtgccaccatgcctggctaatttttgtattttttgtagggacggggtttcaccaagttggccaggctggtctcaacctcctgacctcaggtggtccacctgcctcggcctcccaaagtgctaggattacagatgtgagccactgcgcccggccagttaggttacctacctttaaaccaaacactaagtacccttcaagccaggagctggactgggcatgggtatgtcttacccaggcatcacctcccgggcaataggccctgtgttccttgtcatgcagatgaggagggactttccccatcattcaaaccaagatggcaggcctgaaagcttttcctgagtcccagccaccctcaacagcaagagctatgttcctgagccacatgactggctcttctgtgaaccagaaactccagggagaattccctggaagcaaaggtgcagaagaggagaaggcgcatgggtcagggatcccatcatggctctgccacatcaaatgacccctccaggccacagtgtccttccctgtaataatagggagattagaaggtgctgccttagcagaagaaggtatcacagtggctgaacggtgagaaagccaggcatcccgggtagatgctccttgtctcctactgaggacagttattttcctttaatgttgctaatatcccttctcttcatgtttagggacacagccggtcaggaacggtttcggacgatcacaacggcctactacaggggtgcaatggtagggactttttgtttggttgtttttatctgctttttaagtcaacatgggagcgtcactgtgcattggttaccgaagcctagatgtttctgtggagcccgtgccccaactcctcagggctccttggtcccaagttagtcttaggaacaggctttgtgccccggcctacccccatgtacatacctccccttctggctgcagagacaatgcaaggtttaaataaagtggaaacataattctttgggaatgaagaaagacacaggaagccggttcttccaggtgagctcagtgcagttaaagccggcatgccccgacttttaggagctgtcacatgacctgcatctgtctctgaaatttgctaccaaaagcttgaagatcttccaggagctgacctgccctgggctgtcggccgttatatccgtcacccaggcctgaggcgggatgacgtgatgggaagactcagtcatcatccctcaaaacatttctcaagcaccttctctgggccaggccttaactagatgcagaaggcggccagggatgggacgaggtcctgtgtcaggggccctgtgtgtacatggcagggcattcaggggtagagggagcaggaggtggagcccctggacctgacctgagaccctggcttgcccactgagctccatctcctgacttggaaaagggaacggagcacagcactgtgtctcgggctgtgctgaggataaacggctgcctctccccattcccaggtccctctgctccccactctttcctccgcataccccatcatttaattgctcaggcagctgcctgtttcctcgatgagggcagcgccacatcctggtccctgccatctgcctggccccggggaacctgctgggtctgcagtagttgctcaggaaagacttgtggagggtggagatggaaggaggcattatgtgtttagagcatcccacacggcatccgaaacctcatggcaacccactcgtgtgggctgcagccttagtgtgcctcagtaaaattaatgtatttctttccccccacctcacagttctctggtggagggtgggcaggcggcctgagggcactggggtcttggggagcttcagcctctggagaaaactgtgacctggggcctgtcccgatcttctctgggcccaaatagccaccttccaccctgccctgaccaccaagccctcccctgcaccaggcagtgggcccaggtcttagctcagattatctcattgcattttggctgtgaacctctttgtgcaggcgccattgtcatccctgttttataacaaagaacctgaggtttggcccggtggcctgccccgctgaagttcactcagcaggtaaatggctaggctgggctgggctgtttgtctctagcacccacatcctcaaccagcaccaagatgatcgtggctttccatcctcctagacccaggccaacctgaacagatgccaccactggctgcatgtggctatttgaatttacccaattaacattgaaaatccagccaggcgcagtggctgatgcctgtaatcccagcactttgggaggccgaggtgggtagatctcttgaggtcaggagttggagaccagcctggccacatggtaaaattccatctctactaaaaatacaaaaattagctgggcgtggtggcggatgcctgtaatcccagctactcaggagggtgaggcaggagaatcgcttaaacctgggagccggaggttgcggtgagccgaggttgcaccactgcactccagtctgggcagcagagcaagtatccgtcgcttaactacttaattaattaattaattttaaaaaacattgaaaatccagctccttgggtcaaagcagctatgtttctgatgccctagagccttgtgtagccagtatcagtcatatgggacagcaccaccattgcagctgtgtcctcatctctgtcagcatgctcatagacccttgggcctcaaaatcccaagtttgggaagcattggatgcctagagacccatggtgaggtttgcccagacggggccctggaaaatagtcacttggagccctgaggggtgtttccaggaaaacctggaataggatggctggctcagtgttttccaggtgcttctgcttgattctaagagagagctctacccactgccccactaacgtccaggttctcccctcagctccctgaaataggtataatccaggaatttgagtcttaggcacatgtcaccaacttagtggtgaaggcaggaatcctgggctttcagagggtccagtccccggataaagggccccacgccccctgtccctgaccatgtcacagtcacagggtgtgcccaccgtggatggggcatggcagacatcatgggccactgcagccttgaggttcttcgccatggttgcggctgactgtgaggccattattcatgtccctgaattcccaggaggatttggggttgcagtgactttcttgccccatctgtgtcgtttttgtcccacactcttgcacccacatctgtctcaccattaccacatggcccgtgtccttattctgcaaacttggatggccccagacaacttggccagcagcagaagtcatcagtgccctcaggtgccacagatgcagggctgggcctggggagcaggtagcgaggaggaaggaagaaatccaggcctggccatgagcaggccacgtgccttggagcccaggatgcccggcaacaaagggggacttgtgatggcactgcaggctggcccgctgtgggcactccacaaggacatcgagaaccacacagaccgtcagagggtggcccccacatgtgggttctggggctgaaaaaggcccagggatattgctgagaggataggtgtcatcagtgcttttggagttagcccccccccgccccccgtgcttgaatcttaaaggtcacgtctctgtgcctcagtttccccttgcatcgcatgggcatgtttgcgcttgtccacagcagtagcgaggctgtggacccaggctgaggcggggctgccccgaagctcttccaggacccacgagccgtctcccagttgctcacgtctaggttagggaactggaagggccttggcactctcggctccatcttcacacagccggttccctctgtggtggggtcactggaagttgtgtggatgtcgggtcaggacttcctgggctcagttgtgcctggtaggtggctcaggcagagcgtggggtgagcaaggggtgaagaggaggccgattgcaggggagggtcagcgtgaggggagtgctgctggcagtgggcctgtggaccggctcccaccgtcaggctgcaccaccccgtgggccatgaggggagccagccgggcttgtcagcgagtgcgtggcaggggctggcctgtgaggcagaagggtcacctcagcggcccggggggcaggacaaggctggtgccagaacccagcagaaagaagggccacagggatggagaggagggggctggcttccggggctccacagaggtggggagggcggcagctaatgggcctggctgtgcagtgggtgctgggctccccaccactgttctctggtgccgctgaggcctcccttccagagcctgcagccgatcaggcacctgtgtcttctctccccgcgcagggcatcatgctggtctacgacatcaccaacgagaagtccttcgacaacatccggaactggattcgcaacattgaggaggtgaggccctccggctcctcccactgtccctgcttcagtccttgtcccagagccctctggtttactcatgagaaggccaaggtgcagagacacatacaggccacttgcccacagcctcctagtcagggacatggtgggagcagggactgagatgcaagcagccggccccagggaccacacactggcctggccccaccccggagcccctcggagcccatccctccagctaggctgttggatctggccagtgtcatggttataagagaaaggatatccaagcttgtggtcaccatgagtgttgggtgctttctagagaaggaagggtctagcacaggtgtgacccttgtagttggagggtgtggtgagcaggcgtcagttgtactttgagctatatcggagcagggtgtgacctggtacaaacgacctgtgttcagaccttgaaccatagagcagtgagaagtaggccaacccctcctcccctcccaaagccagcatcttcatcttctgctccccaaagagctgacctcacccccaaagccttcctggctgccggcacctgcagctttctataactaaccatgtggggcttcaggtctgaggcacagccagagaacttttcccatctataaaaccacagcaaaagggcatatcactgtccacccaggactcatggacctcccaggccaggccgagaggccaccccatcatttgtgagtcattgcactgggctcacctccccagtgaccctgagagggctgtgctgccaaatttgccagtgcagggctgcaccccagctgggaaagctgtcttcatccgtggagaggaggagagcctggtctttgtgaaaggtctctgtttctggccagcgggcaggagccaccttctggttcatgggaagtgaggcagggagtggcgcagtaggttccagagaccaagtctgagctggtggaagaagacagcagtttccagtgtccccgtcctccaggaagcgtggtccgctccatggggacccagggagacttgacgaaggagctgcctttgggtatgagggcagagtttgggcaacatcagacagggtggtgaagtgcctgcagctggtgacggcctcgagttgcgaccacctcaggcacggcctgtttctggagcccaaaaatagttgaaatgtcagggccaggcgaggtggcttatgcctgtaatcccagcagtttgggaggctgaggcgggcagatcacctgaggtcagaagtttgagaccagcctagccaacatggcgaaactctgtctctactaaaaatacaaaaaattagcctggtatggtggcagatgcctgtaatctcagctattcgggaggttgaggatcgcttgaacctgaaggcagaggttgcagtgagccgagatcatgccactacactccagcctgggagacagaacgagactccatctcaaaaaaaaacaaaaaaaaaagtgtcaaagcagaaggtcccaggacaacagctggggcctcttgcagaggagccagggagggaaggaggaaagccaaggtcggggggtaaatatctcagcctcactcacctcccataggctagacccgcccagcatcccaggtgcgggggcttgattgatacagccatagaagctgccagaaagcatttcagaaaatgtgcatttgctcagagtagcagctagaaccctggccccagccctggcattggctgtgtgacatggggccggctgcttggcctctctgagcttcagcttgtcccttagaccaggctgtacctagcagtcctgaccccaccgctctgatttctggggacagactgtgtgttggcagaggcacctggcctgtgtcatccggtctgatcccccgtctgtccccctccctctcagcacgcctctgcagacgtcgaaaagatgatactcgggaacaagtgtgatgtgaatgacaagagacaagtttccaaggaacggggagaaaaggtgggcatggtggcacaaggggcagagggcctcggggtcttggggttcttgtgcagaggccttcccctgtccctcctctgccccaggggcctgagacgagttggtcaccccagtggggcacgtgccatgggatgacagaagcacacacccagccggggcttcttgggtgcactctgcgggcatctcatcaaaacctaccatggccccgctccagactttcaagaccacaggagcggggaacagagccatagtttgatcccagcaggtccccgccaccctcccatctcagctgccatccccagcaactccatgccctgtgaggccctgtggaggggcattcactatagaattgagggagtgatccaggaagtcacgcccacagccccagccctgttgctgctccctcttggcgccggccctgccttcagctcctgttttaggcaagctcagatgcgcccggcggctggtgtgctcatgcgtgtgcctccctctctcacagctggccctcgactatggaatcaagttcatggagaccagcgcgaaggccaacatcaatgtggaaaatgtgagtcccgggccctgctgggagacatggggcctgcaggatcggccccttcaggctaaagggggagctggcgtcctccgaggaggtcctgccagacggaccagcctcgggctcagggctgccagtcagtcctctgagggacatttcctgggcagtgccacgtgccaagcacaggcagcccctgggaatgtgccatcagcagggacaggcaccacaaagggcacctaggacgcatctcacgggctcttgggcagccctggggaataggcacggttttacaggtgaggaaactaaggctcagaaagacccagctctgtgtttaccctctcagccacaccactcaccctggagaggcccctgtcaaaaaagcccagacatagcagggagccctgatgggacctgggcccatgccaccctcccctctccacggggcgaccccagccctgcggccgatcctgtgatgtttccccatcctagtcatgtttccaaggcggatcttccatatcactcccgacctaaagtctctatgctgacgtgaagacaaaggctagactccttgcctggcgtggaaggccctccctcaccggctacagctggtgtttgccacccagggctcaggccttgccctccccaggccacctgggctgctcccttctccaatacgtcactgcatttccctcctgtgtgcccctttttctgcctgccaggttcccttttctagtcagggcctggccctgggggcctctccccaagaacaccttcagtctcccctgggccttcctccgcaccccaagccactctcctctccagaacctcccacatcatggggatgtatgttgggatcacgcctcccgccatctctgtatgtcccctcctcaaggctgtgacagcagctcaacccttggctgtgctgggagatgaacctgctcccgctcccagccctgccaggcaaggactccgagtgaagcttgtttggccacagagctgcttgcctttttccctgaccatcagaagggaggccagagctgacagaacctaggagtcagagacaaagaactgggcactcctagatccttctggattggtcggttaactgctgggttcctttggacaagtcacttggcctctctgagcctcagtttcctctctggccaactgagtgtcgccccatctcacagggcttaggggaggtggcacatgcgtaaagtcccgtcaatgctaaggtgctctgcggaagtgagagttgatgtcagagagtaagggtgggtgggaggcagagggagccggggaaggatgagctggggccggacaggccagatgaacccactgccagaggcgggcatcaaagggccaaatgggaggcccacgcctgggaagctgtctcaccacacccgctgtacacgggcggctgaggactcagggtcctgccatcccaaggactcacaatgtgcttattccacaggcatttttcactctcgccagagatatcaaagcaaaaatggacaaaaaattggtgagtgtgtgtccttccgagatccccgggtggatctctgggatccagccatcgtcgttagcagcagtgatatgacgtgccctagatcctgctttttagggcccagccagaccccatgggacattgctgggaaagggggaagagtttgcaggtgtggctggggcatcagcatcaggcagtgccagcctggggacgctgcccaagcagacaaggccgtgcccggtgaatccccaggctagcagggagcacacggccttttccattccactcaagggccagaaagacaacatggtgtgcaaggacagagagccatggctcggagaaaagcttcctaggtcgcttgggcagggccagggctggtgtctgataactgctggctcatcgtcttgacaagcatggcagatcaagaacctgcccccgctccaccccagccccagatgctacaagttgtgacagctctgcaaccttcattgtgtcccagggttctctgaggcctccagggaagtctgcatgaatccctacccatctaccctctcattcgtttcttgcttttttttttttaccacgttagcgatttcctagtccgctgcgctcagtatcaatggtgctttcttgatggaatcaaacacttccctgtactttgggggcatttagtgcctaaacaccgtagtgacccttcctccctcgccctggttccagcaactgccctttcccggccatgttacattggttgtccaatcgaggagcacacggcgctctatttgtgggttaagtctggtcacttgagaatgcacataaaatacaaaatgccgttcaagttttacatctgatgtaagcaaatctgttttgtaattctaagatgcggtgtgttgaacagtgaggcatgtgattgatttaatagcagctctttggccattaaattaaaatgggaaacagttcatggaaaccagtgcactgaccaacaataatttgggattttcttgcaattttttttcttcagtataatggtcaaggtctgattcttttttcttttagttttcttattagttaaaaaagagattttttttttagagtctcactttgccacctaggctggagtgcagtggcaccatcacagctcactgcagccttcaactcctgggctcaagcaatcctcccacctccgcctcccaagtagctggggctataagcacacaccaccatgcctggctaattttttttctttttctttttttttgagaaggagtctcgctctgttgcccaggctagagtgcaatggtgcaatccctgctcactgcaacctctgcctcccaggttcaagcggttcttctgactcaacctcccgagtacttgggattacaggcacatgtcaccacgcccagctaatttttgtatttttagtagagacgaggcttcaccatgttggtcaggctggtcttgaactcctgacctcaggtgatccacctgcctcggcctcccaaagtgttgggattacaggtgtgggccaccccgcctggccattttttcttttttaagaggcaggatctcacttgttacccaggctggactcaaactcctgggctcaagcagttcttctgcctcagcctcccaaagtgctgggaagggtatgatggggtgggcagataagtgagagagtggttggaaggggtggtatatagcagatggaaaatagatctgtttctgaaaaacgaattatcagttgtaagagaattggatggatgggtagaagataatggatggatggttggttgaaagggaataaatcgatggttgatttgttggaaggagatggttggatagatagatgattggtttgttggttggttggaaggggatggatgaatggttggttggaaggaggtggttgcttggaaggggatggatggatggttgattggtcagaaggggtggttagaaggagatggttagttggaagagggtggatggggggaaggagatggatgggtggatggatggttggaaagggatggatggatggttggttggatgaggtggttagaaggggatggatggttggttggttggttggaaggggatggatggttggaagaagatggatggttggaaagggatggatgagtggatggttcttggttggaagggatggatggttggttgattggtttgttggttggaagcaggtggatagacggatggaagggaatgggtgagtggatggatggatggttgaaagggtatagatggatggttggttggttggttggttggttggttggttggttggttggttggatggttggaaggggacagctggacggactggcagatgatggatggatggtttgatggctgattggttggttggatggctggaatggtaatggatggatgacctggcagatgatggatggatggttggatggctcgttggttagttggttggtttggctggtttgattggtttggttgtttggttggttggttggttggttggttggatggttggatggatggttaggtggatggttaggtggatggctggttgattgtgagacgtagtgctgattctcagtgataacctcagaaaacctcttgtgatttcaggaaggcaacagcccccaggggagcaaccagggagtcaaaatcacaccggaccagcagaagaggagcagctttttccgatgtgttcttctgtgaggaacaccgccttactctgagcctcgctcagcccagctgactgtgcctgttctgagtgagcccctcactcagccggggccctcccacctccaacgccccgcccacgccgcggccaccgggcccacggccaccagaatgcaattgagaaatcgtttattttagtaactgtctgatctttttcaactttggagatggaataagttaaaaatttgctatttttcctgtaacatctgctgaacgggcccacccacacgttgtatattcagagagagagagggagtcaaggtgtgaccgtcgaccacagccagtgtcaggcctctgcctctgggcctttgctttgtggcctcactgcaacacaaagctccaccaggaggctggttcacgtcccctaccacggaagcgaggtcccagaaggccagcggtggttccaggagcaacagctcccaaaccctgagcaaggcaaccgatcgccaggaccaggaagcatcacccaggagatttggcgcccacttccacctcttctctcagttttggacaagtgacaaaccattttgccccctcactcttcttttttaactgttaaaccaaaggaaagcacaaatgaaggaaatcctgtgtaaagcattgagaaggaaagaagcctggagcagcctctcctgtccacagccaggggttaggtctgcaggcccgtctgcggtccccatcgagcatcaaggggacgctgtgtgtgctgcaagtgaccccgaaaacaaccacagccgtcacatggtcctcctgaagttggggcaccctcctctcagcaccaaaatggcccccactccttcgtgtcctcccgctatctccaaatcggacgttctttctagctgagatttttatttttccacatctgtagtgccatgaagcgattctgtctttgacttccaatggcaaacctgggtgatcgggaacaagcacgttgtacccttggctggacatggccaagacacaaggcattccacggcggcaagctgaccgcacagcagtctggcttgattttcagccgtcatcattgggttctgttttgacagctctgctgtcccatagggactgcgactgggaccaggtcaaccacgccaggggggtgtcaccagccttttctttttttctttctttttttttttttcctccttaagctgctgtcaatccaaaccattggcatcatcgtttcttttgaattaaaaccaacatatcagcaatagtctgctctccccgggaatctctaacatgctctgtttacatcgataaatgcacttaaggaaaacaaacaaattaaagctcatcttaaagtccaaggatttttatgtccacattttccctgtaggccacacggacatggccaggtgctgggggtgggtctggacaagatggtagagcccatggattaccccatcgagcggccacctcagaggagatgccacccatcatcaaaagactaaattgggaaaagaagcctcctggcttggtgcagtggctcacacctgtaatcccagcactctgggaggccaaggcgggctgatcacttgagctcaggtgttcgagaccagcctggccaacatggtgagcctgcgtcacctggcttctggcacacagctcggccactgtgtccctcctgcctccctggcaggtccttctaggggccctctcctggctggctttccagggcattccttccactctatccagggtccttcccaagaccacacccaggtccagtcattccctaggacttggcagagagctgtactcacagccaagatcacagcaaaatcagcaaagggaaaaggcatgcagagtgaagtccagaggcaaccagacagaagcatccagaatcctctcacagtggggtcacacaccccatgcttaactcccccaacaatgagttgtaacaacaggtgtgtaatgtgtcttttgtgaaagctagttggcagttctgtacccaggtgtttatggagccagtcacataggaaccctctacctggcacttatcaggattccagactcctacaaagaaagcaggggtttagcataaaccgcatcacttgtacagaaagtgtatgagccacgcatgtagggaagttttaatatccgtagggaactttaccaactgcaggcccaccttgccagcaggcctttctcaggaagcagcctcagatctattcattcttttctgcacacactatgcttttagataggccagtggctttcaagctgcaaatccaggccagacccaggtcggtttcacctgccactctctattccaatttgaatgtctcatcggcaccgtaagcataacacagccctgaccctggactccatccctgccttccccatcgtgcccacagctgacccctcccgagttgtagccacgaccacctggacctctgtgaccacttcctcatgggtttcaggtcctcacctctgtgtttcaaactattttcagagtgtccttacgaaactgaaatcagtgtcacctccttgcttaaagctctccccaggggctggggtgtgtggcttatgcctataatcccagtgccttgagaggcagaggcaggggaatagcttgaggccagttcaagttaaagaccatcctggacaacatagtgagaccccatctctaaaaaaaaaaaaaaaaaagtacaaaaattggccgggtgcagtggcgcatgcctcatcccagcactttgggaggccgaggtgggtggttcacctgaggtcaggagttcagagttcaagaccagcctggccaatatggcaaaaccccatctttactaaaaatacaaaaattaggcatggttgcacgcgcctgtagtcccaactactcaggaggctgaggcaggagaatcgcttgaacctgggaggcagaggttgcagtaagccgagattgcgccactgcactctagcctgggtgacagagcaagactccgtctcaaaaaaataaaaaatagtatggtggcatgcacctgtagtcccagctactcaggaggctgaggagggaggatcacttgagcccaggagttggaggctgcagtgagctgtgaccacaccactacattccagcctgggtgacagagcaagaccctttctcaaaaaaaaaacaaaaaacctccccaggtcttccttgggcttagggatacaacttacgcccctcaccgtggggcacaagcctctacacgctgcagccatagccctgcctactccttcctctttctctggctgcccttcctggctcactccactccaatcctctccttccttactccttcactccacactcatcactgagaaggccccagggcctttgcacttgccacaccctagtcttgtagtctcctgaaatgtgcaaagcccactgtccatcacatcatggttatccagggctacctctgcagaggcctctcccagtcatgcccttctctcttcctagctcatcttcatagcatttatgagaagttacctgttttcattgccaaccctgtccccactcagcccaaaacctccatgaggacagggacttctgtagtgtgcttgtgtgtggcctgaacccattgaattaatgaaggacacgcaaatggcctctagggtgagcacaagggaggagacatcctcttccctcaaagaaaccagcttccagggttgatcctgcagcctctgcagcctagggggcagctccccaggcattgcaaactcagtgggtttgggaacccccagccacaaactcccttcccacctgaccatgctagaggcctgccctggtggtccctggcttagctcccatcaaaatctctgtcatctctatccttgagcctccgagcacgcactcaggaggaccctgaatcctgatactaaaactcaaaagtcaccccctgccacggatgcctgataaatggccactttgggaaacttgctttctttccacgaaactttgcagtttctgtccaaaactgcaaaattcggagacagtgacagccaatggcaatgaatagcagatcctgactgggaacccatcctgtgcctggctttcttctgagcccttaatgggtcacggataagagggagctgcctgggcccgaatcccagcaccactcaagacccacggtgatagaggagctagaaagaaattatttaggcagatagtgagggcaccagagtccttggcggaatttcttttctaacaaaaagcagcccaagaaattattttttctaacaaaaagcagtctgagaaatcgagctgcagacatagataagcgagctagaagcttgcacggggaaatgccagcagctgcgtcaatagaaaacagttgcctgggtgccaggcaagaccaacgtggagactccatcttccctgtttttattaccacgtgtacagtaaagggatgggcaacatggcacagctcaggcagaggacccgcttgcatgataaaagattaggggtggccagaaattcacacccgatgcaaatggcacacctagtcctaaccagtttttcacaccctatgcaaatataacacctagtccaaccaatctttcacgccttatgtaaatcaaacactgcctcctcaccaggcatctataaaatcccctgcatttcactgtgcatctgtcaatgcattttttcaggacctctctctgcaggagggaactcttctctttcttttgcctattaagcttctcttaacctcactcttgtgtgtccacgtccttgttctccatggccatgagatgacaaatctcgggtatctaccccagatgaggccgtttcaatggcacagccttggacacatgccctcaacaactgaacttagtttcctctcttgcaaaataggggggatcatagtttccacctcataggatggctatgaagagccagggagatgatggatcccagaggaggcacaggtacatacataatgagcacagagacagaataggctgatatcagcatcatcactgtcctcatcactgtcatcatcatcattatcattattttaaagcagggtcatccggccgggcgcggtagctcacacctataatcccagcactttgggaggccgacgtgggtggatcacttgaggtcaggagttcgagaccagcctggccaatatggtgaaaccccgtctctactaaaaatacaaaaattagccagaaatcacttgaaccagggaggcggaggttgcaatgaacctagatcatgccactgcactccagcctgggcaacagagcgagactccgtctcaaaaaaaaaaaaaaagaaaaaaagaagcagggtcttgctctgttgcccaggctggagtgcagtggtgggatcatggctcactgcagcctcaacctcccaggctcaagtgatcctcctgccttagcctcccaagtagctggtactacaggtgcataccaccacacccaactaattgttttacttttttgtagagatggtgtctcactgcccaggctggtcttgaactggcctcaagtgatcctcccacctcagcctcccaaagtgttgggattacaggtgtgagccaccacacccaccctgttattactatgaccaccattgttcatcttgttccccaagaaaagtgcagtggtgcaatcttggctcactgcaacttctgcctcctgggttcaagcaattctcatgcctcagcctcccgagtagctgggattacaggtcccgccaccacgcctggctaatttttgtatttttagtagagatggagtttcaccatgttggccaggctagtctcaaactcttgacctcaggtgatccacccaccttggcctcccaaagtgctagaattacaggtgtgagccaccgtgtccagccagttctggacatttcatatcaatggaatcatgcactaggtggcctttgtgtctggcttctctcagcatcatgtttttggggctcatccacattgtagcatggagcagtgcttccttcctttctgtggctgaatcatatttcatggtgtggatgatggaaccacgttttgtttacccattcattcattcatggacatttgggttgtttccaccgtttggacaccttagctgtcatcatctgtgcctcagacataccaagttctttcctaccacagggcctttgcccgtgctgattttgtttgtttgtttgagatggagtctcgctctgttgcccaggctggagtgcagtggcaagatctcagctcactgcaccctccgcctcccgggttcaagcgattcttctgcctcagcctcccgagtagctgggactacaggcgtgcgccaccatgcccagctaatttttgtatttttggtagagacagggtttcaccatgttggccaggctggtctcgatcccttgacttcatgatctgcctgcctcagtctcccaaagtgctgggattacaggtttgagccaccgcacccagcctgcccttgctattttcttttctgcctgactgtcctgcatgtgaactcattcagcatctgtctcctcatagactgtgggccctagaagggtggggaccatgccaatcttgccttttttttttgagacacagtctcactctgtgacccaggctggagtgcagtggcatgatctcagctcactgcaacctccatctcccagttcaagcaattcttctgcctcagcctcctgagtatctgggattacaggcatgagccactacgcccaactaatttttgtgtttttagtatagacagggtttccccatgttggccaggctggtcttgaactcctgacctcaggtgatctgcccacctcggcctcccgaagagctgggattacaggcataagccacagcacccggcccgatcttgccttctgcttcatctgcagcatctagcatggtgcccatccagagctggggctcagccagtgtttgtgaaatcaatgaatgaatagaatgaaggcattgtaggaagctaaaatcataaaattacatcaagtccagggttgggcacagtggctcatgcctataatcccaacactgggaggctggggtgtgaggattgcttgagctcaggcgttctagaccatcctgggcaacacagcaagaccctgtctacaaaataaaaattgaaaaattaaccgggcatggtggtgtgagcttgtgattgcagctacttgggaggctgaggcgggaggatcacttgagcccgggagtttgaggttgcagggagctatgatggcacagtgcacttcagcctgggcaacagagtgagaccttgtctctaaaaagaatcgcatcaaacccagtgttggcagagcctaagggcttccccactccctgacatgtatgggcccagcattttcccagcactaagatggcattgtggccacctcccccaagagccaccccacgtgaatctgtgaatggcccacttaccagctgcggcctctgctgagaagcccagatctgtctccctggagaacctggtatcagagagagggggccttggaattctagccccgttatctccccatcagggcaccttcgttttcccctccacacccttccttcctctgggggacgcatgtccgtttgcgggccgaggcctgcggacactgaggggtgtgggggtgattctgttgcgacatctgaaaggaagacgttagtttgtgggagaccacatcacccaagcaggtcaggggaagcgaggttgggccgtttgtggtgaggtcttaggggactgtgctagagctgggccagcgtacccccatgttcctggaaactctaaaccccatgcaaataagagccccgatggtcagactttcccaggaggatcagagaagtgaagtgaagtgaaggccaggcccggtggctcatgcctgtaatgccagcactttgggaagtccaggcaggtagatcgcttgaggccaggagtttgaggctgcagtgagttgtacttgcaccactgcactccagcctgggcaacagaacaagatcctgtctcaaaaaaataaaaaataaaaataaataaataaatacttcaggcctataatcccagcactttgggaggccaaggtgggcagaccacttgaggtcaggagttcaagaccaacctggccaacatggtgaaaccctgtctctactaaaaatataaaaattagccaggagtggtggtgcacacttataatctcagctactggggagactgaggcaggagaatcgcttgaacccgggaggtggaggttgcagtgagccaagatcgcaccactgtactccagccggggcgatagaacaagacatcatctcaaaaataaaaaggccagatgcagcagctgacacctgtaatcctaacactttgggaggctgaggcgggaggatcacttgaacgagaccaacctggcaacatgacaaaaccccatctcttcaaaaatccaaaaattagccaggcgtggtggtggtgctcctgtagtcccagctactcaggaggctgagatgggaggatcacttgagcccaggaagtagaggctgtggtgagctgagactgcaccactgcactccagcctgggcaacagagtgaggggaccctactcaaaaaaaaaagaagaagaaaaagagattagccacagagaggtgaagtgagttgcccaaggcagctcagcccatgaggtctgaggcccaagccagagtctcccccaggcaaacacaaaggccttgcttgaattaagtcacaacaaagagtcctgattctctcactcccaactcatctccatgtgctgtgctggagagttgcctctcctagcatcttcacatgattaaggagggctattatgcccattgcacagatgcagaactgaggctcagagaggctgagcaactcaccttaggacacacagcaggtgagtgagaagcagggctccacgtgtctcctgcttagaccttgttgaccacagagggcagacgaggtgctgctgttgccgaggaggagcaggggggtgagagaggcacccagggtgagcctggggttatctagcccagctgggccagggcaataggcccttggggaggcccccagtaggatctgggccctttctgcctgaaaggagaggaggaagtagttttgtttgtctgcctggggtacgagcacacggccagagctggccaatctgttaggcacacagggcctgcacccaggacccaagtgctgtgtgggacttcccaaagggcttcagcttatttaaaatcagaagaaaaaaaactgaacatcctaataataaatatacaataaggaatccagcctggaccacatcggtcttaatgccaacacagttgtaaaatagaattttaagctggcacggcggcccacacctgtaatcccagcactttgggaggctgaggcgggtggatcacctgaggtcaggagtttgagaccagcctggccaacatagtgaaaccttgtctctactaaaaatacaaacattagccaggcgtgttggtgggcacctctaatcccagctactcaggaggctgaggcaggagagtcacttgaaccaaggtgggcggatcgcttgagccccaggagtttgagaccagcctgggcaacacagcaagatcccatctccaaaaaaaatatttttttaattagtcaggtgtggtggtgtgtgcctgtagtcccagctacttgggagcctgaggcaggaggatcacttgagtccagcagttcaagactgcagtgagctatgatcataccactgcactccagcctgagtgacagagtgaaactctgtctctaaaataggttagtcaattaataaaaatattttaaaatattttataatggaggaagtcctggtgtggacctatgcgtgccatgagaccccagcctgtccaggctcaattcagtttcaaggcctttgtgcctgctcttccctcccccagcctgggcaatatagcaagaccccatctctacaaaaaaatatactctttctgcactacgcactccccaaatcaagatgattccttctcaccctcaaatgccccttccttcacgtcagttaggtcacctctgtgggtttgtgcaactgctgttcccacttcctgtttcccctttggatttttttgtttgtttggggttttttgtttttttgttttgttttgtttggttttcgttggttttgttttgtttgagacggagttacactctcgctgcccaggctggagtgcagtggtgagatctcagcaaaccgcaacctccacctcccgggttcaagcgattctcctgcctcagcctcccaaatagctgggattacaggcatgtgtcaccacgccgggctaattttgcagttttagtagagacgggatttctccatgttggtcaggctggtcgcgaactcctgacctcaaatgatctgcccaccttggcctcccaaagtgctgggattacaggcatgagccaccgcacccagctggtgtttttttgtttgtttgttttgcgggggacagaatttccctctgtcatccaggctaaagtgcagtggcgtgatctcggctcactgcagcctctgcgtccctggtccaagcgattctcttgcatcagcctcctgagtagctgggattacaggcacccgccaccacgcctaatttttgtatttttagtagagacagggttttaccatgttggccagcctggtctcaaactcctggcctcaaatgatccacccgcctcggcctcccaaagtgctgggattacaggcgtgagccaccgcgcccagtttctgttccccctttgttgcttttgtttttgttttgagaaggagtctcactccgttgcccaggctggagtgcaatggtgcgatctctgctcactgcaacctccgcctcccgggttcaagcaattcttgtgcctcagcctcctgagtagctgggattacaggcgtgcgccgccacacccggctgattttcgtattttaatagagacggggttttgccatgtttgccaggctggtctcaaactcctgacctcaagtgatccgcctgcctcagcctgtcaaagtgctgggattgcaggtgtgagccaccgcacccgttccccgttctccctttgtaatgatgtctcactcctcttcactgcttgatagattatagatgccaggagtcagggggcctgcacctgtctccgtgtcacccctgtgtcctccaaacagcaggcacacagtaggtgctcaataacaacttgctgggggcaagacaggagcaagctgtctctgcacctgtggcaccagatgctttgttggactgcagacagggtgacttgagctgtccttgttccgcccccagggctcacctgcttgaggaaacaggaactgcctcggggcagccagccccgccccattgacgtgcagaccttgaatcgaaacccaggctcctgcaggcactggcacagctacagcgagggcctcggccatccaagggtctcccaggtatgtgacccaagagcctcagccctcgaggagacagaacgtgggggctgggctaggccagaaggagggacagggctagtggggcctggggtggcaggagggattttctaggggcatgggggagagcttcgtggaggagggggtatttgtggtgaccacaaatggaaaatggagctggagttagggaaaagggggtcttggcaagacaacagcatgagcaaaggtatggagaggcaagagagagagagcaaggatgtctttaggtctagaatgtgggtagcggggaagtagaggaggctcccaggccagggtcaggagcttgaatttgagcatgcggtctttcatcactagatagctgttcaccagcaaagacccttgcaccctcctctgtgccaggccagcaccaggacacagaaaaaaacaacaacacaggaacctagccctaagccctgatccctaggaggccctcaggctggtggagacagagcaagataaagacactctagctccatggagtcatggctggaccagagagaggaacaggggggaacgttggggacagagaggggtgccagggtgttgtctggggggagatgcaggaaagctgcctggaggaggggacatttttactgggttttgaaggataaataggagctcttccaagtaaaaaaaaagaataagcctgtaaacattaccccatgataggtcacaactggattcatgaatattgtatatatatctctatatatacacagtgctagctaaactttcctaggtaaatatcattattcccaaattaaagacagaaatacagggacagagagccattaagtgacttatctgaggtcacacagcggctaagtgggcgagctagggtttgaacccaggccatctgggtcgaattctaggctcttttttttttttttttttttttttgagacggagtcttgctctgtcgcccaggctggagtgcagtggctcgatctcagctcactgcaagctctgcctcccgagttcacgccattctcctgcctcagcctcccaagtagctgagactacaggcgcccgccaccacacccagctaatttttcgtatttttagtagagacggggtttcaccatgttagccaggatggtctcaatctcctgacctcgtgatctgcctgcctcagcctcccaaagtgctgagattacaggcatgagccaccgcacctgtcccaggctctttttttgttgttggtggtgatgggttttttttttggggtttttttttttttttttgtgagacagagtttcgctctgttgctcaggctggagtgcagtggtgcgatcttggctcactgcaaactctgcctcccgagttcagatgattctcctgcctcagcctcctgagtagctgagactacaggcacatgccactgtaagttttgtatttttatttcatatttatttattttgagatggagtcttgctctgttgcccaggctggagtgcagtggctcgatctcagctcactgcaacctccgcctcccagattcacgcaattctcctgcctcagcctcctgagtagctgggattacaggggtgagccaccttgcccagataatgattgtctttttattagagatggggtttcaccatgttggccaggctggtctcaaactcccagcctcaggcaatccgcctgcctcaggctctgacagtgctgggattacaggtgtgagctactgcacccagcctccaattccaggctcttaatcattttgtcaccctgctttattaaacatttcttaatacagttatttaattttggttgccccagaattccctcaggccataccccagagggtatgcttgacatctggttggagaaagtcaatattgactgccattggtcaacagaccccgcctcctcatagagacagcccagtaaaaagatcttttgagatattgaaacattagatggggccaatgggtggagggagtgagctccagtttaaggacagaatttatggtgagtggccgggcgcagtggctcacgcctgtaatcccagcactttgggaggccaaggtgggtggatcacttgaggtcaggatttggagaccagcctggccaacatggtgaaaccccatccctgctaaaaatacaaaaatgatccaggcgtggtggcacatgcctgtaatcccagctattcaagaggctaaggcaggagaatcacttgaacctgggaggcggaagttgcagtgagctgagatcgcgccactgcactccagcctgggcaacagagcgagattccatctcaaaaaaaaaaaaaaaaaagaattaagggtgagcaagaggggtcctgaaggaactatctagcaagatacaatcctttggcttgtcttacactcacttaataatgttttgcaaaacggtgctgctttctctctccagctctgtcattggtacacaaagtcccatggtaccgcttgcttaaaattgtcaagaaagtgtgtgaattaatgatgcatctgacatatcgtaggtgtgccatgagtggctacaacgtgtagtgacgttggtggcagaagtgactgtctgaagccacatttctctggtgtttaatgaaaccaaggcagccaggcactgtggctcatgcctgtgatcccagtatgttgggaggctgaggtgttaggattgcttgagcccaggagttcaaagccagactggacaacagagcaagaccctgtttctacaaaaaaattttcaaaattagccaggcatggtactgcatgcctgtagtcccaactactcaggaggttgaagtgggaggattgcttgagcctaggaggttgaggctgcagtgagcatgagctgtgattgcaccattgcacactccagcctcaggaacagagggaaaccctgtctcaaaaaaaaagaaagaaagaaatcagggcaaccctttttgaccaccaccgttgggtcagctgtttatttcgttcacttgccattttgtcatttccttattcctccaggggccttgatatttacttaatatttaaatactctactcttttttttttttttgagatggagtctcactctgccccccaggctggagtgcaatggcgcgatcttggctcactgcaacctctgcctcctgagttctagcaattctcctgcctcagcctcctgagtagctgggattacaggcacccaccacctcatctggctaatttttgtatttttagtagagatggggtttcaccatgttggccaggctggcctcgaactcctgacctcaggtgatccacctgcctcagcctcccaaagtgctgggattacaggcgtgaaccaccatgcccagctctaaatactctattcttaaatttcaaaacatttatttataaaatgaactttctagtccttgcaataatggcataaaaggctgggcacaatggctcacacctgtaatgctagcactttgggaggctgacacaggtggatttcttgagtccaggagtttgagaccaatgtgggcagcaaggtgaaaccccatctctacaaaaatacaaaaattagccaggcgtggtggcacatgcctgtggtcccagctacttgggggactgaggtgggagaatcacttgagggaagaaggtcgaggctgcagtgagccaagatggggccactgcactccagcctgggtgacagagtgagaccctgtctcaaaaaaaaaaaaaaagaaaaaaaacacaatggcataagaagaataaaaggaaaagtccttgaaggcctttggggatgagccaatgaatgaatgtgtaaaaactatcaggcacatagtaggtgcccaaaaaatcacaagccagtggttttttttttgttttgttttgttttgttttgttttgagacggagtctcactctgttgcccaggctggagtgcagtggtgcaatctcggctcactgcagcctccgcctcctggggtcaagtgattctcgtgcctcagcctcccaagtagctgtgattataggcacaggccgctgtgcccagctcatttttgtatttttgtagtgacagggtttcaccacgtggcccaggctggtcttgaactcctgatctcaggtaatccacctgccttggcctcccaaagtgctaggattacaggcgtgagccaccacgcccagccacacaagccagttttttgttgttgttgtttttgaaacatggtcttgctctgttccccaggctggagtgcagtggcacaaccacagctcactgcagccatatcctcctgagctcaagggatcctcccacctcagcctcctgagtagctgggactacaggcatgcaccaccacacccagctaatttttaaattttattttattgatttatttgcttatttattttttgaggagtctcactctgtcgcccaggctggagcacagtggcatgatcttggctcactgcaacctctgccccccgggttcaagtgattctcctgcctcagcctccggagtagctgggattacaagtgcccaccaccacacccagctaatttttgtatttttagtagagacagggtttcatgatgttggccgggctggtctcaaactcctgacctcaggtgatctacccaccttggcttcccaaagtgctgagattacaggcgtgagccaccgcacctggccaaattttttaattttttgtagagatgggggtctcactatgttgcccaggctggtctggaactcctgggctcaagcaatcctcccaccttggcctcccaaagtgctgggattacacatgtgagccgtcacacccagccacaagccagttttaagtccattgctctgtccaccctggaggacttctcaaaggaggaggcaccacaagcttcaagaatagagcaaagataagaggtgcatcaagcttgattcttgtcttccctcccttctctacccaggtgaccttccctccaccccaggaagctatgacagaggccgggaagctgcccctaccgctacccccacggctggactggtttgtgcacacccagatgggccagctggcccaagacggggtccccgagtggttccatggtgcaatctcaagagagtgaggacacacccacaccctccaccctgccctccccaccctgtccttgtctgtccctaccctgggcagcttttaactgcagaattctggacttggctcagctcagtgtggcaagaggctaaaatgagctccaggctcccaggcttgaatcctgccacctctttgggctcactgtgtgacctggggcaagttacttgctctctctgagcctcagctttctctatacaagtggccaacagaccagcactgccagggacctggcagcaccccacacctcgcccaggccaagcattaccaatcaacgatggcagcatgcagcctcagaatctttctctctttctttttgagacagggtctcactctgtcacccaggctggagtgcagtggtgcaatcttggctcactgcaacctctgcctcccggactcaagtgattcttccgcctcaacttgctaagtagctgggattacaggcacatgccaccaagcctgactaatttttgtgtttatagtagagatagggtttcaccatgttggccaggctggtctcaaactcctggcctcaagtgattcacccgcctcggcctcccgaagtgctgggattacaggcgtgagccaccgcacccggccagaatctttctgaacacagtactccaagcagctgctctcaacccatcaggatacaaccaatgtgccctttctttttttttctttttctattttttttttttgagacagagttccgctcctgttgcccaggctggtgtgtagtggcgcgatctcggctcactgcagcctctatctcctgggttcaagcaatcctcctgcctcatgagtagctgggactacaggcatgcaccaccgcacccggctaatatttgtatttttagtagagacgaggtttcaccatgttggccaggctagtctcaaactcctgacctcaagtgatctgccggcctcggcctcccaaagtgctgggattacaggcatgagccaccgtgcctggccccaatgtgccctttctacctcagactgtgagctctgaggatgtgggcccggctctaactaaatggaggaaaaaatatttatggccactctctgcatgcaggaaattgagaaaattctgtgaaggccacagagaggaagtagtattggtcatggtttctgagctctggggccttgctgaataacagaaatataacatgagttgcacattgcaatttaaaaaaattttagtagttatattaaaagaagcagctggctgcactggcacttacctttaatcccagctacttggaatgctgaggcgggaggatcgcttgagcccaggagttcaaggctggcctggacaacatagtgagactccatctctaaaaggaattttaggctgggtgcagtggctcatgcttgtaatcccagcactttgggaggccgaggctggcagaccacctgaggtcaggagtttgagaccagcctggacaacatggtgaaaccttgtgtctactgaaaatacaaaattagccaggcgtggtggcgcatgcctgtaatcccagctactcgagaggctgaggcagcagaatcacttgaacccaggaggcggagattgcagtgagctgaggtcgtgccactgcactccaggctgagcaacaagagtaaaactccgtctcaaaaaaaaaaaaattaactgggcacggtggcacgtgcctgtaatcccagctactcgggtggctgaggcaggagacttgctggaaccctgcaggcagagatcatgccactgcactccagcctgggtgacagagcaagattccagctcaaaaaaaaaaaaaaattaaaaaaattagccaggcgtgtggaacatgcctgtggttctggctactcaggaggctgaggtgggaggatctcttgagcccaggaattcaaggtttcagtgagttatgattgcatctctgcactccagcctgagtgatagagtaagaccctgtctcaaaaacaaaaaacaattcatgaaacagcatatgttccttttttgtgttgttttggaaatcagtacaaaaggccagtggcctctgtattgaacagtgcaggaccaaagtctccccagcttgtcccacagaaggcggccttcctctctgtgaactccagataataatggtaataatatagaaaatagactgatttcggtggctcacgcctgtaatcccagcactttgggaggccgaggcgggcggatcaccagaggtcaggagctcgagaccagcctggcaaacatggtgaaaccccgtctctactaaaaatacaaaaaattagctgggcgtggttgcgggtacctgtaatcccagttacttgggaggctgaggcaggagaatagcttgaacctgggaggcagaggttgcagtgagccaagattgcatcattgcactccagcctgggcaacaaaagcaaaactccaactcaaaaaaaaaaaaaaaaagagagagagagagaataatagtaataataacagcaaacattttgggagcacttaccaggtagcagctgtcatgcttatgttgcaagttctttctgttctcacagcagccttggaagtggagtttactctccccttgaggaagctgaaggtcagaaagggagagacgattgcctgaggtcacacagctgatggacagtagagctgggttatgaactcgaatgcatctgagcatacaggtccttctttgttacttgtgacaccttgatccacccaaaggtgccttaatcgggggattccaggcattgggaaggggctgtgggagatgggaggaggtctggcctgagatcaaggtcatcagacgcctcctagctcctcggggggaacatccctaatccctgaatagcccaaggtctgccacagctgaaaaaaaaaaaaaaaaaaaaaaaagatgggtttggggtgtttgttcatttagaaaacaggccgggcacagtggctcacacctgtaatcccagcactttgggaggctgaggcaggcggatcacttgaggacaggggtttgagaccagcctggccaacatggtgaaaccctgtctctactaaaaaaaaaaaaaaaaagttgggcatggtggcgggcgcctgtaatccccgctactcaggaggctgaggcaagagaatcacctgaacccaggaggttgaggctgcagtaagccaaggtcacgccattgcactcagcctgggagacagagcgagactctgtctcaacaaaaaaaaaaaaaaaaaggaaaaaagaggccgggcacggtggctcacacctataatcccagcactttgggaggccgaggtgggcggatcacgaggtcaggagatcgagaccatcctggctaacacagtgaaaccccatctctactaaaatatacaaaaaattagccgggcgtggtggctggcgcctgtggtcccagctacttgggaggctgaggcaggagaatggcgtgaatccgggaggcggagcttgcagtaagttgagatcgcgccactgcactccagccggggggacagagcgagactctgtctcaaaaaaaaaaaaaaggaaaaaagaaaaatgaaaactaccagccttctccatgaatgatcccatggccccaggagtctaactggtacgtggggcggctggactgtttcatttcctttctgtgtgtgcccttccagggatgctgagaacttgctggagtcacagccactgggatcctttctcatcagggtcagtcacagccatgtgggctacacactctcctacaagtaaggcctgggccgggatccagggcaggggcaggtgggctcttgggtttccttggagggggcaaggggtgcttcatgtcatagcttctcagaaagcagcagtaactgaggctgtggatctgagaacgggagctgctagccaagcaatgagtgaagcttttgtccgtagtggcatgttttatctgaggccagcctttgtactcctgtgttataaatgggggaaactgaggcacagcgaggttagtaacctgctgggtgttgcatggccagtgagtgaagaagcctgcatgggaacctggggtagtctggctgtagcagtgacgctgccggcccaagggctggggacttggggcagggatgagggggagtaggatgtcccagcccccgcagtgtctccgcagagcccaaagcagctgctgccatttcatggtgaagctcttggatgatgggactttcatgatccccggggagaaggtggcccacacctcgctggacgccctggtcaccttccaccagcagaagccaattgagccgcgcagggagctgctgacacagccctgcaggcaggtgagggcggggacccacaaggttcacagccatttccttggggccaagccccccagacccctttgtttcccacgcccccatcagctcctcttgattctgtcactctcatggtccttggcccctccggccccaccccagtagtccctctgccccccacagcggtctccgttgtggttcctgcttccccatggctccgccctccaggcccatgtcaacaggctgattttttataagggttcatgtgccaggtataatcttggctcatctgaaggaatgacatctttccttagaaggctcggtgggcgtggcctggctcccaatacgctttccttagaaggctcagtgggtgtggcctggctcccaataaactgctgtgggtggagcatctttccttagaaggctcagtgggtgtggcctggctcccaataaactgctgtgggtggagcatctttccttagaagctcggtgggcgtggcctggctcccaatacgctttccttagaaggctcagtgggtggcctggctcccaataaactgctgtgggcagggcatgtttccttagaaggcccagtgggcgtggcctagcccctaagaaactgctgaggggggttatctctccttagaaggctcagtgggtgtggcctagctcccaataaactgctgtgggcggggcatctttccttagaaggctcagtgggtgttgcctagtccccaagaaactgctgtgggcagggcatctttccttatagggcttggtgtgcctggcctagctcccaagaaattgtggtaggtggggcatctttccttagaaggctcagtgggtgtggcctagctcccaagaaactgctgtgggtggggcatctttccttataggactcagtgggcctgacctagcgcccaagaaactgttgtgggcggggcatctttccttagaaggctcagtgggtgtggcctagctcccaagaacgtgctatgggcggggcatctttctttagaaggctcagtgggtgtgtcccaatccctaagaaatggctgtgggtggggcatattttcttataacgcttagtgggcgtggcctaggtactaagaaactgctattcaagggatggtccctgagacctgccttccagggtccgtgcaggacctttccccctccctagtgctgagctacaggccccttccgccctgcagaaggatcccgcaaacgtggattacgaggatctcttcctctactccaacgcagtggccgaggaagctgcctgcccggtgtctgcccctgaggaggtatgtatatgacaggaggctggcacctcccacctggctgaggggcaggagtggaggtggtcaacagcttccagaggaggctccttctagaatgagaatgcgatcctacagcttggtgctttaaacctttccagtgcttttgcaacaccgagattaaaattcaaactacaatctgaggtcctctttctgcctgtcacctacccagcgccagccctgctgccataccgtctgttgttcagacacaccaagctagcctcggggtctctgcgtgtgccggccccacctcaggtcctttgcacaaactgtgtgccctgcccctagatttcccatgtcttcattcatttctccttcaagtgcctccttccccaggccccagacctaaagcaacaccttctggattctccttcacattaccctgtttattcactgcagcggacttcccaaaagtgttcctcaaaatcctatttacttatgggtttacatgctccctggctgcctttccagtcagactgtgagctctgagagactggagactccatctggcttgtttgcctttgcttctcccacccctctgaaaggacctgccatattgaaggtgcttaactaatgaatctgtggagtagatgaatgaatgtatcacagcatcttggggtttgggagacctttaggcacccctaggttgaagtctaagtgctctccaagccccctgcccagcaggggaagttatgacagtggtacaaatgaaacaggctggtgtgatggacatcagtggaggtggggggtgcaagtgggggaaggcagtcagggaaggcttcctagaggaggtggcttatagctgagatctgcaaggtgaggaggagccagtcatacacacagacacagggaggacattccaggcagcgggaatggcacttgcaaaagtcctggggcttggtgtgtttggaaaacagaacaaaaaaagccagcatatagatggattggggttagtgagagagagattgtcagaagttgaagccccagggtcaggaagggccaatagtgcagggccttggagccaaggtgaggagctgggattctagtccagttgcaccagggaggagccaaaggagagtgtatgcatgggaggactttttttttttttttttttgagacggagtcttgctttgtcgaccaagctggagtggaatggcacagtctaggctcgctgcaacctccgcctcccaggttcaagcgattctcctgcctcagcctcctgagtagctgggactacaggtgcgtgctaatttttgtatttttagtagagacggggtttcaccatgttggccagactggtctcaaacccctgacctcatgatccgctcacctcggcctcccaaagtgctgggattataggcgtgagctaccacacctggccggaactggtggttttaaatgtttcctgtggctactggctgcagaaggggctttcctgggcactggtggagatggaaagaaggaggaagtgaggtgggggtggaggacagtgtcaaggtgggagggacaaaaatgagagcccaggtgtggaaagaaacatggatatttggtctgcgtagtggctcacacctgtattcccagtgctttgggaggctgagaggagaggattgcttgaggccaggactttgagaccagcctgggcaacacagcaagcccgtctccacaaaaaataaaaaaattagccaggcatggtggcgcacgcctgtagtcagctactctgggggctgaggtgggaggattgcttgagcctgggaggtcgaggctgcagtgagccatgattgcaccactgcactccagcctgggtgacaaagcaagaccctctcaaaaaaaaaaaagatttgtagagatggggtctcactacattgcccaggcaggtctcaaactcctggcctcaaaaaatcctcctgcctcagccttccaaagcactgggattacaggcatgagctatcacacctggccccacatttttgtaaagatagtattttgtaacctgtgaaaatcagataaaattcatatttccatgtttatcaataaagctatattagaacccaggcacgctcattggttcacgtgtgacctctggcatccgctacaacagcagagctacataattgagacggatggtacagcctgcaaagttgaaatatttactctctgactctttgtaaaagaagtttgccaggccaggtgcggtggctctcatctgtaatcccagcactctgggaggccgaggtgggtggatcacctgaggtaaggagttcaagaccaccagggccaacatggtgaaaccatgtctctactgaaaatacaaaaattagccaggcgtggtggtgtgcttttggttctagctacttgggaggctgaggcaggagaatcgcttgaacccaggaggtggaggttgcagtgagccgagattgtgccactgcactccagactgggcgacagagtgaaactccatctcaaaaaaaaaaaaaggaagaagaacaagtttgccaacccctgggggagacagtgaagccatttactgagacgagaaagatggggcatgggatcaggtttgggggttcacacggggacgtttctcagccacagggtgtctgggtggaacccaggctccaatttctgggacagacatggtgctctggtgggcaagctgccccaggcctcccctactctcattttcaggcctccccaaagccagtcctgtgtcaccaatcaaaggaaaggaagccgtcagcagagatgaacagaataaccaccaaggaagccacttcctcctgccccccaaaatcccctcttggagagacccgccagaaactctggaggagcctcaaaatgctccccgagagaggccagagggtccggcagcagctaaaaagccacctcgccactgtgaacttgtcgtcactcttggatgtccggagatccacggtgatctcaggccctgggaccggaaaaggcagccaagatcactcaggggatcccacctcgggggacagaggctacacggatccctgtgtggccacatctctcaaaagcccctcacagccccaggcaccaaaagacagaaaggtccccaccaggaaggccgagaggtcggtcagctgcattgaggtgaccccaggggacaggagttggcaccaaatggtagtgagagccctatcctcccaggagtccaagccagagcaccagggcttggcagagcctgagaacgaccagctcccggaggagtaccaacaaccgccaccctttgcccctgggtactgctagagaacaggtccaccctggctctgggactcgctgccaggggctgccacactcctgaatgccttaacatttcttccatggccccacaccatggcatccgggggtcttcgggaacccgggaaatggaataaagatgtttttggggtctgttcctgcactcacccatggggtgagctggttattttagcaacaatcatcagagtgacgctgatggtttggggcaccagctatacatcagccccagtgccagaccttctattcattattttacgcctcagagcaaggccctcagggagggtcatcctccatgttttgaagaagagactgaggttcagagaggataagaggcgtgaccaaggccacagagctatgggtgtcagcaccaggatttgaagccaggtgaatccgagcccttttcccatatcatctgtttgttctgttgtctaaaagcacactgcaagccgggctcagtggctcatgcctgtagtcccagcactctgtggggccgaggcaggcagatcgcttgaggtcaggagttcgagaccagcctggccaacatggtgaaaccccgtctatactaaaaaattcaaaaattacccggacgtggtggcgcatgcctgtaatcccagctacttgggagcctgaggcgggagaattgcttgaacccgggaggcagaggttgcagtgagccgagatcgcatcactgcagtccagcctggatgacagagtgagactccatctcaaaaaataaataaataaataaaaatgaaattaaaaaataaaagcacgctgcagggtctctctccaaccggagcttcgtccaggctcaactccgagtgtgtccccagcggcaccattggctgttcatgccttcctcctggggttttcatgcagatgaaggagacgagttgtgttgagggcctggtgtgcagtaggcacttggacatcatcagtgttggcttcaggagaagcacatgagcgtctttcctttaaaaagggaagaggcagccgggcgtggtggctcacacctgtaatcccagcactttgggaggtcgaggcaggtggatcatgaggtcaggagattgagaccatcctggctaacacggtgaaaccccgtctctactaaaaatacaaaaaattagccaggtgtggtggcgggcacctttagtcccagctactcgggaggctgaggcaggagaatggcgtgaacccaggaggcggagcttgcagtgagccaagatcataccactgcactccagcttgagtgacagagtgaagagtctgtctcaaaaaaaaaaaagggaagaggcagccgtgtgtggtggctcatgcctgtaatcccagcacttgaggagggtgggaggtgggaggattgctcaagcccaggatttcaagaccagcctgggcaacatggcaaggcctcgtatctacaaaaattcaaaaaattagccaggtgtagtggcacacacctgtagtcccagctatttgggaggctgagacgggaggatcatctgaccccaggagttcaaggctgcagtgagtcatgatcaccccacttcagcctgagcaacagagagagaccttgtctcagaaaagaaaaaaaaaaaaaagaaagaaaaagctggccggacgcagtggctcacacctctaatcccagcactttgggaggccaaggcaggtggatcacctgaggtcaggagttcaaaaccagcctggccaacatggtgaaaccccgtctctactaaaaactacaaaaattagccaggcatggtggcttgcgcctgtaatcccagctactcaggagactgaggcaggagaatcgcttgaacctgggaggcggaggttgcagtgagccaagaccaagccactgcactccagcctgggtgacagagcaagactccagactgggtgacagagcaagactccatctcaaaaaaaaaaaaggctggggacggaggaggcatcacagggccatgatggtggagggctctggagggaatcctaggttgtggggctgtgtgacctttggcaagtctagacatctctgggcctactttcttacctggaaaatgagaagagcagtccctcttcaggatgaactggcagaatgcatgtaaaacctgggactttggtgcacagtaggtgtttttctttttttttctttttctttgagacggaggagttttggtctgtcgcccaggctggagtgcagtggttcgacctcggtccactgcaacctctgcctcctggttcaattgattctcctgcctcagcctcctgagtagctgggactacaggaatgcaccaccacatccagttactttttgtatttttggtagagacagggtttcaccatgctgcccaggctggtctcgaattgctgggctcaggcgatctacccgcctcagcctcccaaagtgttgggattacaggcgtgagccactgtgcctggctcctttttttttttttttttggacagagtctcgctctattgcccaggctggagtgcagtagcacgatctctggtcactacaacttccctttcctgggctcaagcgatcctcccacctcagcctcccaagtagctgggactacaggcatgcaccaccacacccagctaatttttgtatttttggtagagacagggtttcaccacgttgctgaggctggtctcaaattcttgggctcagacaatctgcccaccttggcctcccaaatgctggggttacaggcttgagccaccgtgcccagcccagtagctgcttaatttattagcgggttaagatgggagtgagctctctagacatgacatactgtacaatggaggtgtctgggaaggtccctaggggctggtcttggttgcaggagtgactactccttggactgactggggcatagatgggggccctggggcaaccccaggtggagggggtgtggggttccccaaatgtacaaggttcagacatctgggatctggtatgaggtgcacctgggttcaagcccgcccctgcaaatgacttgtggggtggccttaggcaagtcactctgctccctccaaatgagggcatgatcctcggccaactctgcagggatgttatagggggtcagtgtcacgttagggggcagatgcatcataaactgtaaagtgcagcagccacctcagtgaatgacatttccacccctcccaatcagtggtctcctcttggcagctctaatgagtcagcccgggaggaaaagtttcaatccctttgatgactcagggtttgagggataaaaagaaacttgagtagtgaagggtgaggtttggccttcagagtgggaaccctggggtaggacagcacgggcccgatctccccaccacctcacctccgccacggacacccacaacaaggcatttccagccttcacagtgaagacgatctaggagtcaccccttccttgtacaaacagggagatcgtggcccagagagggtgtggccacactcagggtcacacagcaaagtcaaagataaaattctacgccgcctccctcccatcttccagttttaaggtggaaaaatgtgtcctcccagcaggtgtgactcagtgacttgtgtttattctcagaaaccagagtccacagcgggtgaggggtcaccccgccctcctatagctcggctcctctgtggtgccatcagattcggatgtggaaggtgctgtgtgcagagagaaaaggagtcaaggccttcaaggagtggacaaccccttttcctcctccccctcaacacgctcacggcaagtccctgggacaggcaggaaggatgccacatggacccctcaaacaaccctaggccgggagacccctacaggggctgagagcacatgcctttaattttttaattcttttttttttttttttttttttgagatggggtcttgctctgtctcccaggctgtagtgcagtggtgtgatcttggctcactgcaacctctgcctcctgggttcaagtgattctcatgcctcagcctcccgagtagctaggattacaggtgcatgataccacgcccagttaatttttctattttcagtagaaacggagtttctcaacttgctttgttgcccaggctggtctggaactcctgtgctcaagcgatccacccaccttagcttcccaaagtgctaggattacaggcatgaatcaccacatcctgccatatgatataaagtttcaaatagctagaagaaggatactgaatgttctcaacacaaataaatgatacatgtttgagatgatggatatgctaatgaccctgatctgctcatcatacattatatgtatcgaaaccattatgtggcctggtgcagtgactcacccctgtaatctcaggactttgggaggccaaggcaggaggatcagttgaggccaggagtttgagaacagcctgggcaacaaggcaagaccttgtctccacaaaaaaaaaaaaaaaaaaaaaaagtttttagttagctaggcgtggtggtgtgtgcccgtactcccagctactcaggaggctgaggtgggaggattgctcttgagcccaggaggtagaggctgcagtgagctatgattgtgccactgcactccagcctgggcaacaaagtgagaccctgtctcaacattttcagcactgcctcagcttatagataaaaacaaaaacaggccgggcatgacggctcacgcctgtaatcccagcactttgggaggccaagatggacagatcacctgaggtcaggagttcaagaccagcctggccaacatggcgaaaccttatctctactaaaaaaatacaaaaattaaccgggcgtggtggcgggcgcctgtaattccagatactcgggaggctgaggcagggagaagtgcttgaacctgcgaggtggaggttgctgtgagccgagatcgtgccactgcactccatcctgggtgacagagcgagactccatctcaaaaaaataaaataaaataaattaattaattaataaaataaaacaaacaaaattagccaggcacagtggcacgtacctgtagtcccagctacttggtttattcttattttatttcttttttcttttcttttcttttttttttttttttttttttgagacagagtctcgctcaagctggagtacagtggcgcaatcgtggctcactgcaaacctccacctcccaggttcgggttcaagttactctcctgcctcagcctcccgagtagctgggactagaggtgtgccccaccatgcccaggctaatttttgtatttttagtagagactactgcctcagcctcctaaaatgctgggattacaggtgtgagccactgcgctcggccccgtagtcccagctacttaggaagctgaggtgggaggatctcttgagccgaggagttagaggctgcagtgagccgattgcaccatgcactgcagtctgggtcactgagtgagaccctgtctcaaaacaaacaaacgggctgggcgtggtggctcacgcttgtactcccagcagtctgggaggccacagtaggtgaatcacttgaggtcaggagttcaagaccagcctggccaacatgacaaaaccctgtctctactaaaaatacaaaaattagctgggcatggtggcacgtgcctgtaatcccagctactcgggaggctgaggcaggagaatcacttgaacccaggaggtggaagttgcagtgagctgagattgcaccactgcactccagcctgggcaacagagcaagactccgtctcaaaacaaacaaacaaacaaaaagaaacatcactgtgtaccccatgaatatgtacaatcattatttgtcaattcaaaaaataaaaaataaagtgaaatttaaaaattataagataataatagcaacagcaatttattaaacacctattgtgtgccaggagctgtgctgaattttctccatatattaatttggggttcagcaaacctttttctgtaaatggccaaatagttgatgttttcaactttataccatgacgcaactctgttgttgaagcacacaagcagccatagacaaaatgtacacaaatgggtgtggctgtgagccaatacaactttactgatggacacagaaaagtgaatttcgtatcactgtcacgtgtcatggaataatctttttttaaattaaaaaaaaatttttaatgtgtttatttatttttgagacagaatctcactctgtgacccaggctggagtgcatggcacaatctgagctcactgcggccttgacctcctgggctcaagcaatcctcccgcctcagcctcccaagtagctgggactacaggcatgcaccaccatacctggctatttatttatttatttatttgtagatatggactctccttatgttccccagtttggtctcaagctcctggggtcaagagatcctccccacttagcctcccaaagtgctgggattaaaggcatgaaccaccccacctggttggaatattattattctttgattgttttttgatcttttgaaaatataaaagccattcttagctcacaggaggtacaaaaccaggctttgggtcagactggcctattggccgtactttgccctgcagtggcggctgattttccccaaaggctgccaagtacagttacacagtctgttcactgcaaactgttcaggcaacaagggctgaagtccagccacattctgcttgctgaaagaggtgtatccactcgcaagaggtgcccagggggtccctaattatccccattttacagatgcagggactgagactagggaaattgagaaagtttcccaaggtcatgaaagaatgaatagaggaattttcagaaacagagtctgtgaactgtctgcgtaagagccccttcagatgtgcaaatggactgtgggcggtgacggagagcatcacctgaggaagtctggtgcccggaggatcatgttctggaaatcttccagggacagccgcccatcatggtctccatcagcctcatccagcaccttctcacataccaggctcacctcctcggcactcagccccccccgcgtcagtttggtcaccgtctgctccaggtcccacgcacaaatgtagtcgtcgttgttaaaatctgcagagcaggatggatggggagtgacagcaggtggcaggagggctaggccggctgtgggcacatactgtgcccatgttacaagaaggggaaactaaggtcgggcacggtggctcacgcctgtaatcccaacactttgggaggctgaggagggtggaacacctgaggtcaggagttcgagaccagcctggccaacatggtgaaatcccatctctactaaaaatacaaaaatacccaggtgtggtggcatgcacctgtaatcccagctattcaggaggctgaggcaggagaatcacttgagcccgggaggtggaggttgcagtgagccaagatctcaccactgcactccagcctgggcagcaagacagaaactccgtccaaaaaaaaaaaaaaaaaaaaggaactgaggccctgggagggcacccgagaccctggtgtaaaatctggaacttgccttaaaattgggcagggacctgctgggagttcattcattcattcaacaagtatttatgcaatgaatttttcattcgttctttttttttttctttgagacggagtctcgctctgtcgcccaggctggagtgcagtggcacgatctcggctcactgcaacctccacctcctgggttcaagtgattctcctgcctcagcctcccaagtagctgggattacaggtgcctgccaccatgcccggctaatttttgtgtttttagtagagatgggattccccatgttggccaggctggtctcaaattcctgacctcaggtgatccacccacctcggtctcccaaagtgctaggattacaggtggaagccaccacacccaacctcattcattcatttttacaagcattgagtgcctgctgtgtgctaggcactgtaataacttttttattcactcatacaagtatttattgagcatctactatgtgtcaggcatcacagtaactgattttcattcactcactcactcaacaagtatttattgagtgcaattttcattcattcactcacttaacaagtatttattgagtgcctactgtgtcctggcactgtgataataatttttcatttactcattcaaaaaacagttatgggcccggcgcagtggctcatgcctgtaatcccagcactttgggaggtggagatgggtagatcacctaaggtcaggagttccaggccagcctggccaacatggtgaaaccccatctctactaaaattacaaaaattagcggggcgtggtgcgggtgcctgtaatcccagctactaggtaggctgaggcaggagaatcgcttgaacccagggagtggaagttgcagtgatctgagatcgcgccattgcactccagcctgggcgacaagagtgagacgctgtctcagtaaaaaaataaataaataaaaatagttattgagtgcctactatgtgccaaacactgtgacagctctttcattcatttattcaagtatttcttgaacacgtactacgtatcaagcaccatgatatctgtttttcatttattcactcactcaacaagtatttattgagtgcctactgtgtagtgggcactgtgataacttttttcatctattcactcaaaaagtactttttaactgcttactgtgcaccaggcactgtaataactttttcatttattcattcattcattcatccattcaggaagtatttattgagcacctactacatgttgggcaccataactcttttattcactcactcaacaagtattagtgtctactgtgtgccaggtactctgataactttttcattcattcattcatgcaacaagtatttattgagcacctactatgtgttgggcaccatgataactatttttcatgtactcactcaaaaagtattatggtggcagggcacggtggctcatgcctgtaatcctgccactttgggaagccgaggtgggtggatcacttgaggttaggagttcaagaccagcctggccaacatggtgaaaccccatctttactaaaaatacaaaaatttggctgggcgtggtggttcatgcctgtaatcccagcactttgggaggctgaggcgggtggatcacctgaggtcaggagttcgagaccagtctggccaacatggtgaaactccgtctctactaaaaatacaaaaaattagtcaggcgttgtggcaggcacctgtaatcaatctcagctactcagcaggctgaggcaggagaactgcttgaacccggaagacggaggttgcagtgagctgagatcgcgtcactgcactccagtctgggggacagagcaagactttgtctcacaaaaaaaaaacacacacacaaaaaaaacaagtatttattgagtgcacacaaggtgccaggcactaagataactgtttttctttcattcagtcattcaacaaatatttactgagccaggctcagatgacaggtggtgagcaaaatagatactgttggtacctttgagtcttctcagggacaaagtcaataagaagtgaacaggtcaaggaacaagaaattaagcagcattgcctggtgctagaagagaaataggatggtgggatggggggatgaatggggagaggcctacttttgacctagacttcaagggtaagaaggagccaggggagctgggtgcggtggctcacgtctgtaatcccagcactttgggaggccgaggcgggcggatcacccgaggtcaagagttcgagacaagcctggccaacatggtgaaaccccgtttctactaaaaatacaaaaattagccaggcgtgatggcacctgcctgtaatcccagctactcggaaggctgaggcagaagaatcacttgaacctgggaggcggagactgcagtaagccaagattgagccactgcactctagcctgggcaaaaagagcgaaactccatctcaaaaaaataaaaaataaaaatcaataaataaataaggagcaaggcgaaaggtgttctaggcagagggttcagcagaggcaaaggcccagaggccgaagactgtgtttgaggaacagcaaggcccatgtggctggaatagagttagcaaataaatgaggtggggaggcattggagtggggtggaggacagggccacatagggcctcaaaacccctggggagatatttgtgatgtgggtgccacccacccagttcccactccccaccccatccccatgcttcccaaccccagggccacgcacgcaccataaattttaaaagcatagtaagccttgaggtcgcggggagccatttcactcatcacggaaaacatgtccaaaaagttgtccagggtcatgtggccatccccatcctcagagaatacctgggcaatcctctggcggaaggggttgtcctggggacagaaaggaagctgggaggccatcctctgacccccaaggtctctggggtccatgtggtctcactatcagcacccaccttctgggaacctccaagtaccctccatcaagacccactccctcccatggtccctggacaggactttggacaactccaccctccacccctgtgatctgagcaaccttgccccaacttccagctcttggagcagccatgtgacccaggcaaggccaatcagagagttccattcacctggcaatagtgattggctctgtgatgggcatgtgactcaagctagccaatcagaggctgacctgggatatttttctgaaaaattgggagggaggggacctgattactgctgcttgcaaagctcacagaagctaaagctgagtggctgagaggtcccttcacagcctcaagaggtgaggctgccttagactgaaacctcttcctgggaggagccgagatatggggggagattcctgagcacatcatcagaggccctggttccagctgtacctgacactgtccctgcctctggatttttttgttgttgttcaggggcaatccattttgatccaaaccattctgtccctctcaaataaggtttttgtcacttgcaataaaatcaaccctactcacagtcagttactcaacccacaagttccccttggaggcacaaaccatgtgtcaaacatcctgctgataaaaacctgcatttagcagctcctgttacaagaagaactaacgttctctgagtacttgacacacaacacaccctgtactgaatttgttgcctgtattatctcgtttcatcctcccaattctgggtgttttttgtttgttgtttgtttgtttgtttgttttttgagacagagtctcactctgtcgcccaggctggagtactgtggctagatctctgctcactgcaacctccacctcctgagttcaagcaattctcctgcctcagtctccctagtagctgggattacaggtgtgcactaccacgcccagctaatttttgtatttttagtagagacggggtttcaccatgttggccaggctggtctcgaactcctgacctcaggtgatccacccgcctcggcctcccaaagtgctgggattacaggcttgagccaccacaccagccaactctgggttttaaccctgtctctgtcacattgtagctgtgtgaccatgaacaagtgtcttaacctctctgagtctcagttttcttatctttaaaatggggataactgcagcactgacctcagaggaatgcaacgagagacatctctactattttttaccctgtttgtcccatggcctgggcataccttcagctcgggcatgctgccaatgagctcgtagggcaccttcacatcggggcaggtggtatagtcgaggggcacgagctgtggggccaggtcctggtagcgatagaagagcctgatgtggggaggaaaaagctgggaaagactgggagcagggagcaggcaagacgcttgtcccttctttgttttttgagacagagtctcggtctgtcacccaggctggagtgcagtggcacaatctcggctcactgtaacctctgcctcccgggttcaagcaattctcctgcctcagcctcccaagtagctgggattacaggcacaccctgccacgcccggctaattcttttgtatttttagtagcgacggggtttcatgttggtcaggctggtctcaaactcctgacctcagatgatccacctgacttagcctcccaaagtgttgggattacaggcgtgagccaccgcacctggccaagtcccttctctttcacattcacagctgctcactgcacactgaggtatactgggtccccaagaacactcagccctgggcctggacctcaagcatacagagcctgacacaggcacccctaacctccctgggggcagggtcaaggtgcagagagggccacaggacaaagggagactggactgggggaagcaagctagcgaggagaagggggttcctggaagaggggacattggttctgggctttgaagcatgagtaggagcttctaaagcagatggagttgggagaagggagggtgcttatggccagatcacagcaagcattcagagaatcctatataatccacacatctctggatattgtcatgttatcagcaagaccctgcctccaaagataccttcactttcataccttcccttcctctccttataatgggaggaagaggccggatgcagcggctcatgcctgtaatcccagtactttgggaggccgaggcgggtggatcaccagaggtcaggagttcgagactagcctggccaacatggtgaaaccccatctctactgaaaatacaaaaaattagctgggcgtggtgacgggcacctgtaatcccaactactcgggaggccgaggcaggagaatcacttgaacctgggagctggaggttgcagtgagctgagatcgtgtcactgcactccagcctgggcaacaagaacgagactctgtctcaaaaaaaaaaaagaaaagaaaaaagaaagaaagaggccgggcgcggtggctcacgcctgtaattccagcactttgagaggccgaggcaggtggatcacgaggacaggagatcaagaccatcctggctaacatggtgaaaccccgtctccactaaaaatataaaaatttagccaggcgtggtggtgggcgcctgtagtcccagctactccggaggctgaggcaggacaatggtgtgaacccgggaggcgcagcatgcagtgaaccgagatcaagccagtgcactccagcctgggcaacagaatgagactcggtctcaataaaaaaaataaataaataaaaaataaaaaagaaagaaagaaaagaagaaagaaagaaaaaaaaggagggattcctcaatggggcagagcagagacaaacagctaatagtcacattttttctaaagggcagacaaaagatattttgcaaataactgaataccacacacactatccagattataaggccagttctccactcagaagccctcacctgtgacaccataccttcattagggcatgctgagcagcagccttgcagagaccatccttggtgggtctgaggtccccaagctgctagggactgtctctgagagagacatgagtccctaggtcatatgatgactaggaactcaatgaaggtggggtggggagacctagaactttcatcctgaccactcagttccctgtcggggtcccatcagggaataccctgggtttaggtttctgtgtggctctgagcatgttcctctcctctccctctctgtgccttggttattctatctgataagcaagaagcttgggacagacaaaatgtctgtccttggggccttggggctctgtgcatttacccttcagcctgggatcagccccgccctgtctgagcctcagtttccccatcagtaatttgatcgtgatggccgaggtgaccctgcaagctgtcctcacccaaacaatggggctcactagtaaaaggtgtggccatcaataatggatgtcctgttactacacaactggggccttggccccgatcacactgcagctgaaccctggccagcttgggtttcatagctccaagttcatgggtcggggcccctgggcaatggccccacaggccgagtgatgatgtgggatactcatctgtgcccatcgtgctgggtcacgccagggacctgcagcagccttgggccacctcctcacaccctcatcttaatgccaagcccacaacccagactgggctctggactttgcacctgggctcccagcctcaagtcccagtctcaggagaatctttatctttcattttgtttttctgaggcagagtctagctctgtcacccaggctggagcacagtggcgtgatctcggctcactgcaacctccacctcccaggttcaagcaattctcctgcctcagcctcttgagtagctgggattacaggcacccaccacctcgcccagctgatttttgtattattagcagagatggggtttcaccatgttggccaggctgatcttaaactcctgacctcaggtgatccacccaccttgtcctcccaaagtgctgggattacaggcatgagccaccgcgcccagcctcaggagaatctttctaacgtgctgatggtctctcccctgctcatgcatgctccatagctccctgccacccttgggagaaagcccaagctcatcagcctagagactgggacagtatgacaagatgtgacttgtcagcttctccatctctgcctctgtccactgaccacacctgccccccttccccatttgagtcccaacaaattggaaataccagttgggcatggtggctcacacctgtaatcccagcactttgggaggctgaggcagggggatcgcttgagcccaagggtttaagaccagcctgggcaacatagtgagagccccatctctataaaaaaatacaaaaatgaggtacatgtggtggctcgcaccagtggtcctagctactcgagaggctgaggtgggaggatcacctgaccttgggagatcgagcctgcaatgagccatgattgcaccactgcactccagcccaggcaatagagacagaccctgtctcaaaaaaaaagaaaagaaggaaggaaggaaggaagggagggagggagggagagagagagagaaaagagaaagaaagaaagaaagactacttacacacacacacacacacacacacacacacacacacacacacaccaaattgcaaatatcctccagcaatgaatagaaagttgtttttccagatcttctctcccttcctccctggactgacctcatgatctccttccttgtgaaaaatgtgcagtcctgtggagagaggtgttgtcttaacccgaaccctgcctctggggcctcctcccacggcctcctccctccaccccacactcacacagatggcctgatgctgccacacacagagcagaaccaggaacccaggcggacggtacacccagatgaaggcattctgttcccatttcccagaccacggaaccaaagttgtcaaacccactgaggacccatcctgcccccctctacctgatacgcttccagctgctcgtgtgtgaagactgtctgcttgttgcccatggtgtgaaccacagcccagacttggggatgcaccccaaaggctcccagcttcctcggggccacacgggttgccaggctgttgtgtaccagtgtctgggcaaatctccctgccctggctgtcacccacccacctacgccatcaccccctgcttgatgagactcaaattacagccaggctctctggacaacagcctgaatgtgtccatgggtaaggataagggctgtgggatgtcacagagaagacctcagtggggaggccacatctgccaccacaaggtgaggctggggttatggggcacactcaagagacaggcagggtatacagaagggctatgggcacactgcagctcaaatcccagctctctgcccactagctgtgtggccctgggcaagtcacctgacttctctgaacctcattcatgagatgaaaattacattatacctacctcatagggtcattctcaggatctgagatttaaaaaaaaaaaaaaaaggttttgactgggcaaggtggctcacacctgtaatcccagcactttgggagggccaggcaggcggatcacctgaggtcaggagttcaagaccagcctggccaacacggcaaaaccccatctctactaaaaatacaaaaattagcttggcattgtgacacatgcctgtaatcccagctactccagagactgaggcaggagaattgcttgaacccaggaggtggaggttgcagtgagccgagatcccgccattgcactccagactgggtgacagagtaagactccatctccaaaaaaaaaaaaaaggttttggctgggcgaggtggctcatacctgtaatcccagcactttaggaggacaaagcatgagattcacttgaggccaggagttcaagatcagcttgggcagcatggcaaggccctatctctactaaaaatacaaaaattagctggatgtggtggtgcatgcctgtggtcccagctactcaggaggctgaggtgggaggattgcttgagcccaggagtttgaggctgcagtgagccatgattgcatcactgcattgggaacataatggtgaacaagctagatgaagttctggggtgtgcattgacattattattttattacattttatttttttgagacagtctcactctgttgcccaggctggagtgcagtggtgtgatctcggttcactgcaatctctgcctcccaggttcaagtgattctcctgcctcagcatcccaggtagctgggaccacaggtgtccaccatgccaagctaattttttttgtattttttttttttgagacggagtctcgctctgtcacccagtctagggtgcagtggcgtgatctcggctcactgcaagctccacctcccgagttcaggccattctcctgcctcagcctcccgagtagctgggattattacaggcgcccaccaccacgcctggctaagttttgtatttttagtagagacagagtttcactatgttggccaggctggtctcgaactcctgacctcaggtgatccacccgcctcggcctcccaaagtgctggaattacatgtgtgagccacctcgcccggcccaaagggcagatctaatgtagcagctaccaactttattaaggcccagaatcctcttgggtggagaatctgagagtctaaatttcttagcctggccctccatgcccttctcactttgggtctcacctgtgttttctctacctggcctggactattgcaatgtttcccagcaggctttcctgcctcggcctcatcaagcatcctctgccaaatctgtgcagtcatcttgtaaaatgtgaccctgatcaggcttgaaagatgcctcaaggatgacttttttttttttttgagacagggtctcactctgtcacccaggctggagagcagtgatacaatcatggctcactgcagcgaccctccttcctcagcctcccaggtagctggcactagaggcacatgctgccacatccggctaatttttttttttttgtattttttgtggagacagggtctgtctatgttgcccaggctggtcttgaacacctggcctcaagtgatctacccaccttagcctcccaaagtgctgggattacaggcatgaaccaccatgcccagccatccaagaataactttcaaaaaataaacaatatcaagtgttggtgagggtatggagcaactggaatgctcatacattgctggtgttgatgcaaaatggtatagacactctggaaaataggttggctgggttttttttaaatagaattaaacttaaccttaccacaagattcagggcctggtatggtggctcatgcctgtaatcccagcactttgggaggccaaggcaagaggaccactttagcccaggagttggagaccagcctaggcaacatggtgaagccccatctctacaaaaatacaaaaattagccaggtttggtggtatccagctacttgggaggtttgcttgaggtagggaggtcgaggatgaagtgagctatgatcactccactgtactgcactccagcctgggagacagagtgagatcctgtctcaaaaaaaaaaaaaaaaaaagactcctgggtgtttacccaagggaaataaaaacctatgttcaactgagagtgacccctaatgtaaactatccactaaccactgtgggtgataatgatgtatcagtgtcagttcatcaattgtaacagactagctactgtcatgcacttgcatgtggaggatgttgattgtaggggaagctatacaagtatgaaagcagcaggtgtacgggaaatctctgtaccttctgatcaattttgctgtgaaactaagactgctctaaaaaaataaagtatagtgtaaaaaaaaaatttaaactaggttcacacaaaaacctgtcatgcccacagaatgggacaaatgctcagtgctcaagtcatttatataaaatggcataatatttgcatatagcctgtgcacatcttccatacactttatttatttatttatttatttttattttactttttcgagttggagtctggctctgtcacccaggctggagtgcagtggcgtaatctcagcccactgcaacctctgcctcctaggttcaagcaattctcctgcctcagcctccctagtagctgggattacaggtgcacaccactgtgtccagctaatttttatatttttagtagagacggggttttgccatgttggccaggctggtcacaaactcctgacctcaagtgatccggcccaccttggcctctcaaaatgctgggattacatgggccaccatgcccggccctccatagactttaaattatctctaaattatgtataatatctaatgaaatataaatgctacataaataattgttacacatttttatttgtattctttttattgttgtattatttttattttattggttccaggtattttcactccgtggtttattgaatccatggataaggaaactggatatgaagggctaactgtatttgtgaatcatatatctcataaggaactactattcagaatatataaagaactctcagggccgggcgcacgcctgtaatcccagcactttgggagaatgaggtgggtggatcacctgaggtcaggagttagagaccagcctggccaacatagtgaaaccctgtctctactaaaaatacaaaaaattagccaggtgtggtggtgggcgcctgtaatcccagctactcgggaggctgagacaggaaaatcgcttgaacctgggagggggaggttgcagtgagctgagatcgtgccactgcactccagcctgggcaacaagagcgagactctatctcgaaaaaaaccaaaaaacaaaacccacgataaaaactaagaactcttacatctcaaaactagaaagacaacccaaataaaaacattatgctgatcaaggtaacttttgcaaaaaagagaaaagaagaaaacaaaaacattatgttgagtgaaagaagctagagatgaacagtcccatatagtgtgattctatttacatgaaatgtgcacaccaccacacctggctaattttttaaatttttgtagagatgggatctcaccatgtcgttcagactcgtctctaccttctgagctcaactgatcctcccacctcaccctcctaagtagctgggaccacaggcaggtgccaccgcactcgctaattttttgtattttttttttattccacttgggtaaatatcgaggggtaggattaatggctcatattcagtatataagaaacttgccaaacttcttcctaaagaggctgcactagtttgctttctcaccatcagtgtttgtaggttctagttatttcacatcttctccagcagttactattttcagttttttatttacttttatattttaattaattaattaattaatttatttatttatttatttatttatttcttgagacagagtctcgctctgtcgcccaggctggagtgcagtggcgcaatctctgctcactgcaagctccgcctcccaggttcccaccattctcctgcctcagcctcccgagtagctaggactacaggcgcccaccaccacacccggctaattttttatatttttagcagagatggggtttcaccgtgttagccaggatggtctcgatctcctgacctcgtgatctgcattttttgtattttttgtagagatgaggtctcaatatgttgctcaagctgttctcaaacttttgggctcaagtgatcctcttgcctcagcctcccaaagtgtttggattgcacaccaggccaggtgtgagtcagcctggcatagaaaatttacacccagcctgacatagaaaaattaattttggccaggcgaggtggctcacacctgtaatcccagcattttgggaggccaaggtgggtggatcacctgaggtcaggagttcgagaccaacctggccaacacggagaaaccctgtctctactaaaaatatataaacgagccaggcgtagtggcacatgcctgtaatcctagctactctggaggctgaagcaggagaatcacttgaacccaggaggcggaggttatggtgagctgagatcgcgccacggcactccagcctgggtgacagagtgagactccgtctcaaaaaaaccaaaccaaaccaaaacaacaacaacaacaacaaaagacaacaagtgttgtcaggggtgtggagaaattggaacacttacatagttggtgggaatgcaaaatggtgtagctgctatggaaaacagtatgaaggttcaaaaaaaattaaaactatcagccgggcacagcagctcacacctgtattcctagcactttgggaagccaaggcgggtggatcacttgatctcaggagttcaagaccagcctgggaaacatgatgaaactttgtctttacaaaaaatacaaaatctagacagatgtggtggcatgctctatggtaccagctattgggaggctgaggtgggagtattgcttgagcccaggaggttgaggctgcagtgagtcatgattgtgccactgtactccaacctgggcaacagaccctgtctctaaaaacagaagaggaagaagaagaaggcaaatcacacattgtgttcttaccacaatgtcttagggggttttttgtttgttttttgagatgaagtttcgctcttgtcgcccaggctggagtgcaatagcgtgatctcagctcattgcaacctccacctaccgggttcaagtgattctcccgcctcagcctcctgagtagctgagattacaggcgcccgccaccacactcggctaatttttatatttttagtagagacggggtttcaccatgttgatcaggctggtcttgaactcctgacctcaggtgatccacccgcctcggcttcccaaagtgctgggattacaggtgtgagccacctcgcccagactttaccattatttttttgttccgcttcccaaagtgttgggattacaggcatgagccaccacacccagcctttatcacaattttttgttaatgtagtttaaatatgcagctaccgtaattacacttttgggcaatttcaaaggaatggaaacttatgttcacataaaaatctgtaacagatgttttatcttaataaccccaaactggaaacaacccacatgtgaatgtttaagcaaatggatacgtccataccatagaaaattactggagaatagaaaaggtaaatattacgacttggatgaacttctagggcattatgctgagtggaaaacaaaccaatcctagcaggttacatattgtatgattccatttatatcacattctttttttttttttgagacggagtctcgctctgtcgcccaggctggagtgcagtggcgtgatctccgctcactgcaagctccgccttccaggttcacgccattctctttcctcagcctcccgagtagctgggactacaggtgcccgccaccacgcccggctaatttttttgtatttttcttagtagagacggggtttcagcgtgttagccaagatggtctcgatctcctaacctcgtgttccacccacctcggcctcccaaagttctgggattacaggcgtgagccaccgtgcctggctatatcacattcttaaaatgaatgacaacatcagagaaatagagaacagatccctgtttgccagctgtgcaggaatggaggtgaggggataagtgtgtatggctacaaaagagcaacaagaggaatttttttttttaaagacagggtctcactctgtcgcctaggctcgagtgcagtggtgccatcatagctcactgcagccccaaactccctggctgaagcaatcctcctgcctcagcctcttgagtagctaggactacaagcacctgccaccaaacccagctaacttttgtattttgggaggagacagggtttcaccatgttgcccaggctggtgttgaactccttggctcaagggatctgcccgcttcagactcccaaagtgctgggattacagacgtgaaccaccatgcctcgcctctgtttatttcttaaaactgcatgtgagccttcaattatttcaaattaaaagtttaattaaaaaaattacttcccctccatttaaacacattttgtttcacattttaatacctccaaaatcaagatgcatctcgaaagtactgttggagcattctcattgcctatacatgcacacccattaaaagcatccgcttcaaaactcacagaatggaggcagaggctaggaagaaaatcccctaggatgtgaggaatgggggtgtggaatcccatgcgcttagctacattcctgaagtgggagctcactcagcaagcctgacattattgcaaagctggctagaaagtcaagccccaccctcacttaattcctttacagattctttcttttccctttttttttttttggagatggagtcttgcagtcttgctctgtcactcaggctagagtacagtagtgtgacctcggctcactgcaacttccgcctcccaagttcaggtgattctcctgcctcagcctcccgagtagctgggattacaggcgcctgccaccacgcctggctaatttttgtattttcagtagacacagagtttcgccatgttggccaagctgttcttgaactcctgacctcaggggaaccacccgcctcagcatcccaaggtgctgggattacaggcatgagccaccatgcccagcctctttcttttcctaataaacttttagttttgaaataattttaaatttacattaaaattgcaaggatgggctgggcgcagtggctcacacctgtaatccctgaactttgggaggcaaaggcaggcagatcacttgaggtcaggagttcgagaccagcctggccaacatggagaaaccccatttctactaaaaatacaaaaaattagccatacgtggtggtatgtgcctgtagtcccagctactcgggaggctgaggcaggagaatcgcttgaacctgggaggcagaggttgtagtaagcgagatcgcgctgctgcactccggcctggatgacagagcaagactctgtctcaaaaaaaaaaaaaaaaaatagccggatgtggtggcacatgtgtgtaatcccacctactgcaggggctgaggcaggagaattgcctgaacctgggaggtcgaggttgcagtgagccaagatcgtgccactgcactccagcctgggtgacagagtgagactccatttcaataaacaaattaactaatttaatttaagtgcaaggatgatacagacagctcccataacccttttgacctgcttcctctaatggttttttttttttgttatttatttatttatttatttttgagatgtagtctcaccgtgtcacccacgctggagtgaaatagcaaatggcaaaatctcggctcactgcaacctctgcctcctgggttcaagcgattctcctgcctcagcctacccagtagctggggctacaggtgtgcgtcactacgcctggctaatttttgtattttcagtagaggcgcagtttcatcatgttggccaggctagtctcaaactcctgacttcaaatgatccacccgcctcggctcccaaagtgctgggattacaggtgtgagccactgagcccggctctaatgttaacatcttacacaaccacagcatatttagcactactaagaatttaacattggcacgttactatttctttttctttttttgtagtttttttttaatttgtattcaagactcaacataatcattttcttttcctttttttttttttttttttttttgagatagggtcttgctctagtgcccaagctagagtgcatcaatcaagatcctaaatcactgcaccctcgaacacctacacccaggctcaagtgatcctcctgccttagcctcccgaggagctgagaccgcaggtgtgccccgccacatccggctaatttttttcttttcttttttttttttttttttttttttgagacggagtcttgctctgtcgccagggcggagtgcagtggcacgatctccgctcactgcaacctccgcctcccgggttcaagtgattctccgcctcaagcctcctgagcagctgggattacaggctcgcgccaccacgcccggctaattttttttatttttagtagagacggggtttcaccatgttggccaagatggtctccatctcctgacctcgtgagccgcccgcctcggcctcccaaagtgctgggattacaggtgtgagccaccgcgcccggcaaaaagatcgccttgcttttgacacaaaagtgctggcagcccccatcccctggtaccagaagcccctctgcacagtcttttccaggtgtggacggataattaggcagtgacttgctgccccctgcaggtaagactgagaaaggcagcccctgtgccctcctttttcttgtgtccggtagatttggggacgtttgcttctctcttctccacctcctttgccttctccccactaccccaccccccgccagcaattaaaaaaaaaaagccaccctggcacaatttggacaaaatctatgagaaataaaacgtgcaaacgtgcataaccttggacctagtaattccattggttgcaaaagtcagccaagatttgtgggcacggattgtgttcattcatttatctagggcagtattagggctgtttctaatttgttggctattacaaataaatctgcagtgaacattcatttacacaattttatatgggtctatactttcatttcacttgggttaaaacgtaggaatctaattcttttgtcatagtataagtgaatgcttaatcttttaaagaactgtcagactgatttctaaactgtttatgccattttacattcacaacagcagcacgtttgagttccagtttcaacacatcttcacagatacttggtaggcacagcctttttaaatttttcccataatagtttttttttttactaggtttttgatacagagggaaatagagaagaaaccaaaaattccgatagtcctctgctgacattaaaaagatatattcaagggccgggcacggtggctcacgcctgtaatcccagcactttgggaggctgaggcaggcggatcacctgagttcaggagttcgaaaccagcctggacaacatggcaaaaccctatctctactaaaaatacaaaaattagcggggcatggtggtgggcgcctgtaatcccagctactcaggaggctgaagcaggagaatctcttgaacctgggaggtggaagttgcagtgagccaaaatcgtgccactgcattccagcctgggcaacagagcgagactctgtctcaaaaaaaaaaaaaaagatatatgcatgtacacatcgtatgtaagaaaaccgcacagtactgaaaggatgaaaagaaagaaagaaagggccaggggtggtggctcacgcctgtaattctaatgcttcaggaggactgcttgaggacaggagtttgagaccaacctggacaacacagcaataccctatctctattgattttttttttttttttttttttttgagacggagtctttgtctgttgaccaggctggagtgcagtggtgcgattttggctcactgcaacctccgactcccgggttcaagcgcttctcctgcctcagcctaccaagtagctgagactacaagcgcaggctactatgcccagctaatttttgctttttgtgttttgttttgttttgttttagtagatacagggtttcgccatgttggccacgctggtttccaacacctgacctcacgtgaaccgcctaccttggtctcccaaagtgctgatttaaatatatatgtactttttttttgagatggagtctctctctgtcgcccaggctggagtgcagtggtgtgatttcagctcactgcaacctccgcctcccgggttcaagcgattctcctgcctcagcctcccgagtagctgagactacaggcgcccgccaccacgcccaggtaattttttgtatttttagtagagacggggtttcaccgtgttagccagaatggtctccatctcctgacctcgtgatccgcccacctcgttttcccaaagtgctgggattacaggcgtgagccaccgcgcccggcataaaatagatttttaattgttttaacataccaccaaccttgtcacatgatattgtcatttacctaaagctgaaaaattaatgaatactgattaggtttacaaaattaggttcagctatccagtgaacgctcaaaatatggcaataaaagagaacgggggtggtggggcgtggctcaggcctgtgatccctgcgctttggaaggccgaagcaggaggatcacttgaacccacgagttcgagaccagcctggacaacacagcgagaccccatctcgacaaaaaaatttaaatgaaaatattagccgcgctcagtggcgcccgtctgcagtctgctactggggaggctgaggcgggaggatctcttgagcccaagggttcaaggctgcagtgagccacgatcgcgccactccactccagcctaggtgacagaccaagatcgtgtctctaaaaaagaaaaaaaaatcaaggagagagaacaggtcacccaaaagtgcgcaaaacgctcaaaaaggggttgggtttccagcaccctgtgtgaagaatgggagaccggaagtgggcgccaaattcggaagtgtggcagcagataggaatcgaagggcactcattcgcttggctctctgtcccgcccactacccggaagtgtggcccgggtccagaaccaagagcgcatgctcaccttgtagctcagccaatcaaagagaagcgaggcggccattcgggcggaaatagtgtttgcaaacaggaagtgtggcactccagctaccgaagcactggagagtgtcatggaggcctacgagcaggtccaaaagggacccctgaagctgaaaggcgtcgcagagctgggagtgaccaagcggtgaggcccgagggcccgcgggattccgtcttcatcccccttagaccttttctcgggacccctggccctgatcctccgacccgccgcctcctcatgtctttttccaggaagaagaaaaagaaggacaaagacaaagcgaaactcctggaagcaatgggaacgagcaaaaagaacgaggaggagaagcggcgcggcctggacaagcggaccccggcccaggcggccttcgagaaaatgcaggagaagcgggtgagcagaagcagaaggcggcggggaggcgggaacacccggcgccgggagactggaaattggggtcagggctgggacgctccgagggcaggggagcggtcagaggagaccttaattacggggagaggatgctgtacgtgagtgagagaagagtcgccctctgccgggggagctccaaggatgagaagaccccgctggcccgagtgggcagcagaggggagagctagaactggcgttgaaaggaggccagagctggagacccgggtttggattccagtgctgtggcttatttgccctgcgacactaggccagtgactttcttatttccgtgcctcaagtttcctcttctgtacgagtcagggtagtaacttattctaagagggttgggaacttgagaggaagtcatgaaagtaaaaagcagtgcatacatgttcagtggatgccagctcttgatattaaatggccatgctcgccgctcgaagtcaccacaaagtttgtttccaagacaactttgtttggcagattcaaacatgctgtattttttaaaaaattagttatttttggcggggtcagagcactgcagcctctgcctccggggttcaagcaattctcctgcctcagcctcccgagtagctgggattgcaggcgcccgccaccacacctggctaattttggtatttttcgtagagatgcggtttcaccatgttggccaggctgatctcgaacttctgatctcaagtgatccgcccgcctcagcttcccaaagtgctgggattacaggcgtgagccaccgcacccagtctcagctgttgatattgaatggccatgcccatgacgactttgtttgtattgtattataaggctccgataaattattttttcttaacaccataaatgtgtgcagtggagaacagaagagttcacagtaagacagaaactgggtccattatgctggggagagggaataatcagtgtaggtcagtgattctcacctgggggtagtctccacccccctaaactcccaccccgaagcacatgtggcaatgtctggaaacatttttggttctcaactgggttggggtggggactactggcaactagtggctagaggccagggatgacaccacacaccctgcgatacacaggacagcctgccgcagcaaagagtgatccggctccaaatgtcagtagcactgaggctgagaaaccctaaccctggtctaggtgattctgtacggtgacactggggaaaatggaccttggggacaattaactccttactcccagatctaattcaggcatacagaaaacacatggatgcactacctctggcatgacagacctgagtttgactctgcctctaccacaaattagtggtgtgaccctgggcaagccggctacctattacttaaagtagcactaaagtctgcctcacagggttgtggtaaggatttaacaagtcaggcgggcggatcacgaagtcaggagttcaagaccagcctggccaacatggtgaaaccctgtctctactaaaaatacaaaaattagccgggcatggtggcacacacctgtaatcccagctacttgggaggctgaggcaggaggattgcttgaaccagtacccgggaggcagaggttgcagcgagccgagatcacgtcactgcactccaggctggcaacagagtgagactccgtctcagtgagactcagtctggctctgtcaccgaggctggaatgcagtggctcgatctcggctcactgcaacctccgcctccggggttcaagcgattctcctgcctcagcctcctgagtagctgggattacaggcgcctgccacgacgcccatctaatttttttgtatttttagtagagatggagttccaccacgttagccaggctgttcttgaacccctgacctcaggtgatccgcctgcttcagcctcccaaattgctgggattacaggcgtgagccaccacgcccggcctttttttaattttttgaaaaagcctcgctctgttgtccaggctggagtgcattggtatgatctcagctcactgcaacctctgcctcctgggttcaagcgattctcctgccttagcctcctgagtagctgggactacaggcgcccaccaccatgcccagctaatttttgtatttttagtagagacggggtttcaccatgttggccaggctggtctcgctctcctgacctcaagtgattcacccgcctcagcctcccaaagtgctgggattacaggcgtgaaccaccatgcctggccaagtaaatgcatttctttcccttctaaccctgaggttgtagtcagaggcagggctgagattttattgctggaagccagaatgagacttatgcgagacttaggcagctattaagagactaataatgggagctcagagtagagcagtcgtgatggagccagtggaaggtaacaggtttggaataggttttcaaggatgaattcagggttagctgttgggttggatgtaagctgggaaagaaagaagagtcaaggatgaccaagactttgggctgggcagtttgatgaatgaaggtgctgtttactggggtgggaaggattgcaggtaaagcaggttttctggagtgggagttgagggagggggaaccaaagctatagttttaaagaaggtaaatgcagtgccccagtagaaatccaagtggagtcagccaggcacagtggctcatgcctgtaatcccaacattttgggaggccgatgtgggaagatcagttgagcccaggagttcaggactagcctgggcaacatagcgataccctgtctcttcaaaaactaaaatagtagctgggtgtcacgcctgtgggcagagcccagccaggtgcctggcattgtgtggcagctggacaagtcagtgtggcttctcacagggagacacaggctttggctgggctcacagcagcaggaagagggacagagatgggcagggcactcgccttagagggagaatcagccaggtgagggctgactggacacaggaggtgagggaatgaaggagaagggggggacagagaggagcagccaggtggcccctaccaataatatctcatgatgctctgggttgactgggcttagcagggtctgacctcacttggagtctggtgtggtcagatggcagctgggcctggagtctctgaaggtgcagctgggctgcagcatctaagatggctttgtcgccatatagctggtgcctcagtgcttctttttttttttttttttttttttgagacagtctcgttctgttgcccaggctggagtgcaatggcaagatctcagctcactgtaacctccacctcccgggttcaagctattctcctgcctcagcctcccaagtagccgggactacaggcgcatgccaccacacctggctaatttttgtatttttagtagagacggggtttcaccatgttggccaggctggtctcaaactcctggcctcaagtgatcctcccaccttggcctcccaaagtgctgagattacagacatgagccgccatgccccacctctcagtgcttctttcgtggcctcttccttcatgtcatctcatcttccaggtcctttctttccagcagggccatcagacttcctgcacagcaactggcttccaagggcacaaagctaatgctgccaggtcttatgcatggacccagaactggtactgtgttccttcgagttaactgagtccacggccaggtcagagtcagtgtggcatggggactgcacaagggatgaatcataggcagcacagttataggggccaccaaagagtgggccacagtcacccagccaggaagtgtggagccaggtgtggcctcagatctgtctggctttatatcccacactccaactcttttttttttttttttttttttttttgacagggtctctctctctgtcacccaggctggagtgcattggtgtgatcatagctcactgcagcctcaacctcctgggtcaagcagtcctctcaccccagcctcttgagtagctgggaccacaggtgtgcaccaccaaaatcagctgattttcttgtagagttggggtctccttatgttgcccaggctagtcttgaactcctgggctcaagctatcctcctgccttagcctcccaaagtgctgggattacaggcatgagccaccgcgcccagcccacactcccagctgctaccagatactgacctttccaggtgtcattgagtgtttgaagtgaggatcagagcaggtcatggtgcaggaggcatatttcagaataaccctggggatggtgatcctggtcttgtagccctaacatcaggatgggaagtgtcacttgagcacctgctctatgtcagaccctttacctctctctttctcatcattcctgaaacccgctctgggactttgttttcctccaaactgggagtgctaacagcctcctcaggatgcaggaagcatgccgacagctcccagcagagtctgctcatgggtacgcgctcaggcattgctggttcatttcctgccactcacgaagctggcaagtgacctgggttccctgttggaccagcctgggtggagttgagggagggggacaaggcacagagcctgaaacctccagctgttctaaatgtgagagccagtctggccaggctccatcttccaccccatgccagcctgggctgtgttgagcctgtaaactcacctccatgtctcttctctctccagcaaatggaaaggatcctaaagaaggcatccaaaacccacaagcagagagtggaggtgagtcgccgtgtccagtgggggagactgagccattcagggtcccagctgggcccagaggctatcagctggcagagggagctgttggcatgttgacgagaagggaagtttacctaatagaagtgacacttccccagggttattcaaaggggagcccagggttcaggagtctgtaagacctggcagggtgagtttgagaggagggggctcaggagagataggatgtgggagaggtggggctgggcagtgccacttctccccagtaccccacttgggtctgcgctgacaccggccttctactccacctccccaggacttcaacagacacctggacacactcacggagcattacgacattcccaaagtcagctggacgaagtagccgcctgcccccagtatggagcagcatcgagggttcgcaaaaggccacactggggttgtgtgtgtttcctttggtatattctggaaacatggctacacacacccttgcatcttctgctacagactgcttttcgaagctgtgtaccctcattctggaacttgattaaagtaagatcgtccttgtactcagtttaggcttcttggcaacatacagaagatacacccttttcgtttggatggaaagtttctaagtttatccagaggtaaagcccattgtgtgtctgtgtcatgtaaaaatgttttcacccgagttgcatgtaacgctctgaggccagccagctgtcttctcctggatgagacagactccagagggtaaggagctagcgccatggtggcctgcagtatgcagagccccgcaggacccagcgtgggcgcccttccaagcttcctctagctttgggcctatgctgtcccctgcaggccctagggaagccacttgcaactatgcggccttcagacttcctcctcagccacctggccactgagacagcatagcctgggtaacggaacagccacctaaggcaagaatggaacggacacaccttgctcctttctgagcccgtttcccaaaaccccccttccaggtgcttctaatgggtgttgccatagcagacgctgctaatgcatcacagcattctttgaaatggaaccagacacagcctgcctctcaatcctcagctgggggctcctagcagcctcttgtatttactcagagttgacacatcacacagatcctgtttggcattcctaccttacggacgtctcaggggtgacaggaccagggcagagccccggtacaaacagacaaggctgcagtcaaatgggagggtccaggtgtccgtgttggagggctgggatcttgtagggcctgtgcgtcctggctgaggatcaaaccacatatgttattgggagaaacgatttctgttgacgtagatattgaaagaataatgaaggcagaagagaaaaacgaagtgtggaatttggggttgtcctgtgtaaattacacaataaagcaaaagtcagttattgtaagtctgagtgtcttctttttttttttcccagacagagtttcactctcttgcccaggctggagtgcagtggcataatcttggctcactgcaacctccacttcccaggttcaagtgattctcctgcctcagcctcccaagtagctgggactacaggcaaccgcgactacgcctggctaatttttgtatttttagttagaaacgggatttttccatattggccaggctgatctcgaactcctgacctcaagtgatctgccgcctcagcctcccaaagtgctgagtgtcctcttataggctgtttgtcaccaaaatgtcttttggatttgtggcacagaaaaatattcatactggaaaacggcaactcaggtggaaaaatttcgatggcacatctgttcccgcctatggttcacacctaagagagatgacacacactctcattagcagtggcttttgccagtgattctcccatggcctggtggaaagacagtttcagaccttttccttccacaagctagcagcaggagtctgcattatgtactactgtggaaaccctttattagtatagtggaaaggtagttatttcagctctttccctgcataacaaacggctccaaaaggcagtggcttaaaacaacaaaaatgtatttttattttattttattttattttattttatttttttgagatggagtcttgctctgttgcccaggctgcagtgcaatgacgcgatctcggctccctgcaacctccacctcccgggttcaagcaattctcctgcctcagcctcccaagtagctgggattataggtgcgtgccaccacgcccagctaatttttgtatttttagtagcaacagggtttcaccgttttggccgggatggtttcgatctcttgacctcttgatccacctgcctcagcctcccaaagtgctaggattataggtgtgagccaccacacccggccaaaactttatttattatcacaactctggcttgactgtgctaggctggaggattctgttccatggagtgtggttcagttcactcatttagttgtgttggctttcccggggccagaaagtccagggtggcatctcaccctccaggatctccctccacaaagcctatttctttattattgttgttattattattattatatttatttatttattttgagacagagtctcgctgtgtcgctcaggctggagtgcagtggtgcgatctcagctcactgcaacctccgcctccctggttcaagtgactctcctgcctcagcctcctgagtagctggaattgcaggcacccaccaccacgcccggctaatttttgtatgttagtaaagacagggttttaccatgttggccaggctgctctcgaactcctgacctcaagtgagtcgcctgcctcagcctcccaaagtgctgggattacagacatcagccaccacgcccggcctacatagcctatttcagcggccaaaacaagccacctagccaaacccggagtctggcagggaactccacaagggcatgaacactaggaggtgtggtttactgggatccaatacccttacagtccaccaccgctgtcctcaaatttacattagaatcacctggggagcattaaaaaccgccaagttctggtgccaggcacagtgcgacgtatgcaaatgtaatcccagctgctcaggaggctgaggctggagggttgcctgagcccaggagttcaaagcgagcctggagaacagagattcttattgtgtgtagggagtgttgtggcaggccaggtctcactaatgcaggcctccggccttcataatgactgtttaagtactgactaagtggttaattttttttttttttttggagatggcatttcgctcattgcccaggctggagtgcattggtgcgatctcggctcactgcaactctgcctcccgggttcaagcaattctcctgcctctcagcctctggagtagctgggattccaggcatgcaccaccgtgcccggctaatttttgtatttctagtagagacagggtttcggtatgttggccaggctggtctcaaactctcctgacctcaggtgatccacctgcctcggcctcccaaagtgctgcgattacaggcgtgaaccaccatgcccagccaagagaggcttttgatactaattgcccagtgattaagctctagaaggaatccgatgagatgtcaggactattattattaccattattattattttgagatggggtctcattctcttgcccaggctggagtgcagtggtgtgatcacggctcactgcagctttgacctcccaggctgaagtgatcctcccacctcgacctcctgagtagctgggatcacaagtgtacatcaccatacccagctgatttatttatctctttgtagagatagggtctccctatgttgcccaggtctcaaactactggcctcaacctcaagtgatcctcctgcctcggcctcccaaagtgttgggattgtgggtgtcagccaccaagcccggccacagctgtgacttcccactgctcaggaagaacatcagggtctgttcaccaagagttaacagaaatagacgcgatatgtaacaaaccctgttggacctagtctcatattttgccccatttattgtaatgttttagagatcttactctgttgcccaggctggagtacagtgatgccactatagctcactgcagccttgtcaacctcccaggttcaagtgattcttctgtttcagcctcccaagtagctgggactacaagtgtgtgccaccacactcagctaatttttgtattttttgtagagatggggtttcatcatgttccccaggctagtctgaaactcctgggctcaagtgatcctcctgtctctgtctcccaaagtgctgggattacaggcatgagccatagaaccaagcaactttttttttttttttatttgagactcagtctcaaaaagataaaataaaaaaagaaagaaagatcatacctattatgatacaccagggtttctcaaattttgtttcctattagcatcatctggggagcttggaaaaaaatcccaataaccaggctgggcgcagtggctcatgcctttaatcccagcactttgggaggccaaggcgagcagatcacttgagccgaggtgtttgagaccagcctgggcaacatggggaaaccccatctgtacaaaaatcgcaaaattaagcctggccaacatagtgaaaccccatctttactaaaaatacaaaaactgatctgggcctggtggcacacatctgtagtcccagctactcaggaggctaaggttggaggatcgcttgaacccaggaggcagaagttgcaatgagctgctgagattgcaccactgcactccggcctgggtgacagagcgagaccctgtttcaaaaaaaaaaacaaaaaaccagaattagctggccttgatggtgtgcatctgtagtcccagctgagccaaggaggtgaaggttgcagtgagccgagattgcaccagtgcactccagcctggtgacaggataagaccgtgcctcaaaaaaaaaaaaaaagaaaggaaaagaaggccaggcgcggtgactcacacctgtaatcccagcactttgggaggtggggcgggcggatcacaaggtcaagagatcaagaccatcctagccaacatggtgaaaccccgtctctactaaaaatacaaaaattagctgggcatggtggcaggcacctatagttccagctacttgggaggctgaggcaggagaatcacttgaacctggaaggcagaggttgcagtgagccgagatcgtgtcactgcatgccagcctggtgacagagtgagactctgtctcaaaaaaaaaattaaaaaaaagaaaaatcccaataaccaaaccctggcccagaccaattaaaacaaaatctctatacatggctttcaggcctcagtggttcttattgtgtgtgttgtattgggggggcttttgagacccccactcctaacctattcccagaccaaactgagggttgggcttctatatctcacagcccaataatgagacacagatgaactagggaggaagagagtttttatttctgtaactggttacagggagaaggcctggaaaatatcaccagaccaacccaaaattacaaagtcttccagagctcatataccttctaagctatatgtctacgtgtaggtgtgcattcatctaaagacgtaagtaagttatagtcttttaacccataactaagatctgagtcctgaagaccttcctctggagcctcagtaaatttacttaatctaagtgggtccaggtgctggggtgattacccttatcttatctcctgctaaatcatggaggtttgggggagttccttcaaaccccaataaacttgtttgtggaggcctgaggagtttcttcagaccgccaataaagcttgtttaatcctaaaagggtcctgttaagaattccttcattatcttgtcatgcttcaaggcccaggaaaggcctaggcacaactctgggtgggcttttgttacatcccagcctttgtataagggcactggctctcttatcttttaatatttaacttaacccttgtaatcccagcactttgggaggccgaggtgggtggatcacgtgaggtcaggagtttgagacaagcctggccaacatggtgaaaccacgtctctactaaaaatacaaaaattagctaggtgtggtggcacatgcctgtaatcccagccacttgagaggctgacacacaagagaatcacttgaacccaggaggcagaggttgcagtgagccgagatcatgccattgcactccagcctgggtgacagagtgagactccatctcaaaaaaaaaaaaaaaaaaaaaagcaaacaacaaaaaccctctcttggctgcttgctctgtgccttgagcaagaatccttccagcccaggagtcacttagcagtcttcaaacattctagtttgcttctctagagtttcggtcacatttctttcctaagcaaaacactatataattaccgagttgcaaaaatcatctttccaaacgccaaaacggagataagacagaaaataaaagatgtgagaggcaggcatcctgggtaaatcactctggtattgcagggttgggatccccagggtactatgatggctaactggaacagaatgcaggcatttctccaaagcccaagagttcataaaagcaaattaaatatgactcaatggattaatcaagggccaccagttgcattactgattactaactttgcagaaatgaaacacggtatgttgggtcaaggttcagtgaggctggttttcataacattccaggcaataaacaggcacactcattcattgataaatgttgacaatgacaggtggtgactgttgataaggtttgattgccattcagaaagtttgtttgacctctttccaagtaaccacgaccttacctctctcttttgagcttatcacaattggtgactgtacacttgtttcatagacttccccaccagactgtgagctccatagggctgggccccaggtcggtttcaccaccaggctctctcgcctaactcggcccacgggaggccgtttccagctgctctggctccatagctcagcctggcagcggccactgggtgccctgatttggtcggccccgccccaccgggccttacttccgggatgcttctggcgggagcaagaaacatggttacatacgacgtaatgcgcctgcgcacagtccgtcctgcgcctgcgcattcctgacagcacctcccggaccggacataacggtccccgcgcggctccccgaaccggaagtggaggtgagctgtcgcgggcggcgcccggccttgctcaacgcccagcagtccccaccgtcgctgccgccgccaccgccctcggccgctgccgaggcctcctgcagccatcatgtccgccagcgccgtctacgtgctggacctgaagggcaaggtactgagggctccccaccctccctgttgccaggcaaccggcaggggcctccgcccgcggggacccaccctgttgctaggtaaccggcttatgagccccatcctggtgtgaggcagagaggccggtagacctcacctgagagccccatcctgtttctgggtaaccgggcgggggtcttaagtgggtaatccccgccctgttgctacgtaacgcggtgggctgcagccaccgcgttgccaggtaactgactgcaccgccctctgctccccggcgccggggccgggggctcgggcctcggtggaggacccagaagcggggccgcagccggcctcggagccaggcagggcgtccaggggctgcgcgacccttggccgggggtggcgaggcgtggcggggactgggtgctctcgagccagtcccgccttctcagggcgttacagcttctgtttatcgtgcactttctctcagtaggaatttctccacgttcattgtgatagtgagttacaaggattaggtgaggtgagtggtgatcacgagtgccgttttatagagggagaaactgaggcatggagaggtgaagcaacctgaccaaggtcacaatggtcacagagaagtagcaagtctaggagtccgatccagaatcattcgtttattcagctgatatctggggagcacctactaatgccgggcagggtactaagcctggggtcgatttgtgtttagcaaaaaacagtccctttttttttgttttgtttttgagatagtgtcatgctcagtcgtccagtctggagtgtagtggtgcaatctccactcactgcaacctccgcctcccgggttcaagcaattttcctgcctcagcctcccaagtagctgggattacaggcacctgccactacgccgagctaaattttgtatttttagtagaggcagggtttcaccatgttgaccaggctggtctcgaactcttgacctcgagtgatccacctgtcttagcctcccaaagtgctgggattacaggtgtgagtcatgtgccagggctcaacaatctgtgttcttacggtgttcacaggctggtaggggagatggatacccatctccaaaaacacaaataaatgtcaattgcagtggtgttgaggggcgagtgtgttatacagacagtcagcctcagcccgaggatgagagagggtttccctgaggaggggtgacaaatggaccagagacaccagggagctggacataaactagaacccaggcatcttccccagaggatctgagaaaactttaagaagggattgtccccaccttttagaaatggtcctctgccttctcctaagtccatcccaggtgcaaggcaggtggctgcctggcctgttgcatgtggaagcaacaagaaccggtccaacaatgtgaagcccaacattgatcagtgagagaaacaaacatgggtgtcaggtcctaggtgaggcgggcaggggtgagccctaaagcagctgagagtgaagaggtgaaatggctgccccttcccgccccaccccacccccagcactttcctgaagtcccttgagtgggtgcctgctctggaagccacccaaagtcaacaactggtgagacccagtgctgggcttccctcccccgccttcttggaaggagggaagacacccgtcttagagcacgccaggggctgggtggtgcggtggaatgagtcctggtggaatgagtcttgcttccaccctggccactgcctccccagaggtgccagtgggctgcctgtcttggcttgcttattccttcagcaaacatttcatgagcacctagcatgcaccctgccctatgccgggcatagggtgtccattggcgccatggctgtggtgttaggggtgagctcaaaacccatccctgctgctcagctgtgtgacctgggacaggcaccttctcctgtctgagcctcactttcctcactggtcaaaagaggcttttatggagttattgtgcagatttgctgagcagatgcatgagacaggctcagcaccacccatggtccatgttagctctcccaggcctctcggtctagcaggggagtcacctagaagcagagacattaccacacagttggatccaggcagccacaggggcaggaacaaggtcccaagtcctgcagttgctcaacctcatctttagccagtggaagggggaggtggttatgaaaggctccctgaagagggcgacgctggaagtaggtttggaaggcacgatcatgtggaaaagaggtgttgcaaggggcagcctgctggggctgccaagccagaagtcctggctaatgctgagatgggagagagggaccaaggggaccacttcagttccaaccaggagccaccgtgaggagaccgtagcccagagaggcatgatcagacctgcctttcagaaagctccccaaggcagccgtgggcttccttcccttcctctgcaaccatgatgccctttcttattccacgacccacggacctcctgtttccaaagtcagcctcgtgagccgactgcatttaatcaacaataaagcacactgagaaattcatggccacgtgtctggtcaccgaggacaccagcgtggccacactgggctgggaggaagctgtcctagtaggaagcttctccgctttatctaactggcttctcagcagcttctgacaccactaaccacctcctcttcagtgctcccttccgcttccaggaggctgcgctctggggggtttcctcctgtttcttgcactgcctactttcctccttttctgccctccccagggctgtggagcggctcaggcctacgcgtgcctccccatgctgtcactcttcccaggtgggctttgactcatgtccatgggccagtgactctcaattttgttcacagcatttctctggagatctagtggcctctgagacaccagagaggtcccgccgccaccataaattcagcattcttctaaatgcactccctgtacctgctctctttccatttcagtgatgccatcacccattcagccatctgcacaagagacctggacgttatcctcgcctcctttgtctcctcacccctgttttcactccacaaatgtttactgagcacctactatggtccaggcccctttctgggtgctggaaaacagctgtgaatgagacaggagtagttgctgttctcaggggatgtcagacagtaaaggaggatagaaataaatgtttaatgcaccaggtgatagggataaagcaggggtcagggttcagagggatgggacatgatctcagccagagcaagcagggaggatttcttttttttttttttttttttttttttttgagatggagttacgttctgtcagccaagctggagtgcaatggcacaatctcggctcactgcaacctctgcctcccaggttcaagtgattctcctgcctcagcctcccaagtagctgggactacaggcatgcaccaccacgcctggctaattttgtatttttagtagagacagggtttcaccatattggtcaggctggtctcaaactcctgacttcagatgatccgcctgcctcagcctcccaaagtgctgggattacaggcgtgagccaccgcgcccagctgggaggacttcctagaggaggtgttatttgagctgaggcttgagaaatgagaagagccaggtcagggcaaaggcccgaggtgggaacagatgtggatcactcagagaccagctaaggggccaggctggagcagagtgaaccagggcagcgcaggcagagaggcgtcagaggggctgtgaggagccagaccacgctggtccttgggagccatggggacgggcttgggctttgttctcagtgccggggaggctggggtaagtggcagttcagcagtgggggagagaccccgtctggcttctgtgtaggaagagccctgtcaccctttgtgaggaaggacctggggggtcaagagtgacagcagggggaggggctgttccctcaacacgtcatcacctgcctccctccaatcagttccacaggccacgaagcagacactaggaaaggaaggtgccaccccgcaccacccccagtctcgccttgagagaataaaggcagcgtgtgatgaaatgccaagttctgaggcaggtggttcccaggatggtcagcgccgcaatggccttctcagcatgttgctgagtcctgcagctggctgtcctgcaggccccaagagctgcagctgctccaggcagcatctccaaccgcagccatgcccaggctagcaaaacttccgacctcctttttattctttaatgaggtataatttacattaataacctgcacttatctaaagtgtacaatttgatgagctcagtcatgtgggaagccataaccacacattccatcgcccccgaaagcttcttcacacccctttgctgtctagccccatccctaggcacccaccgatgtgtttttcatcaccattttctaggattttatacacgtgcagtcatgcaggatgagctctcgtttgtctggtttctctcagccagcacagtgattctgatgcgcctgtgtatcgggagtccgatcccttccgttgctgaggcatgcttctcatggtgtgcacggatacagtttgtttctagttcacctgctgaaggacattggcattgtttctagtctgggtctgtttcaattaaagctgctgttaagattctcgtgctagtgtttgtgcagacatgtggtttcatttctcttgggtaaataccagagagaggaatgactggatcgtatggtaactctgggtttcactttttgagaaactgccagactacaccaaagtagttgtcccattttccattcctatcagcagtggacaggggttctggatgctgtatatcctgacccacaggctatgaaagagagagaccaggaagagggcttctcccttcaggccacctgtggacttcagtaaatacgaaccttcagcgggagtgggcgccctgacacaggcgggagagcaaggtgcgttggcccggcaaaggctctgagaaggtctgcattgagagcttgtgaggcattgcttaacctgatgtctctgggtgattcagtcctggacctttgctgcagagttcgcctctaccctcaccctgcgaagaactgcagtggcccctgtgggcattcacactgggagatgctcttctccaggaattccctgggggatggagatcagaacggcctcaagtcctgctcttttgcggatagtggccatgaccggagtccccagagcgaagcagggtggtgcatctcaccccctgccccaagcccccagattgtagaactgaaaatgcaagcatcttttctcttccttccccaccccaggtgctcatctgccggaactaccgtggcgacgtggacatgtcagaggtggagcacttcatgcccatcctgatggagaaggaggaggaggggatgctgtcgcccatcctggcccacgggggggtccgtttcatgtggatcaaacacaacaacctgtatcgtatccctttgctgggggtgctcccaggggactcctgtgtgggtgttggtgtgtgtgcatatccacacgcctgcaagcagggctggtttgtgcacagcgcaagcattggacacagccatgccctcctggagctccctgctgcctgcggagacaggcagacaatgcacgatgacatgtgtgatgggtgtggggagaggagcaggtgtgacttgaacctcttcagcccaggggcccaggaagggaaatgacaccctggaggaagcctgcagggaggcctggcttctgccagctggaggggtgggcaggcactaggcgtgggtgaaggctctgcagggaagagcctcattccaacagctgcactcggggtggctggagagggggcgtgtagggcagcgaggctggagtggtcagcggggtctggggtctcaaagaacatcatctgaaatgtgacaggaagtctctggaggcttttagatgtgtgtcttctggaggtttctggctgctgagtggggcaagactgtggggacaggagaggacatgggtaggtggggagtaggctggggccatcgtgcaggtgggaggggaagtggcctggaccacggaggggtggtggggtacagccccgcccagatctcagagccccccacccttcctgtccttgggcccatggggagacttggccaagccagtttctatccaggaggtctaactggccaccccacagctttgggcagacccgcaagcccatctcagtacccacactactgcggaagggcctgctttgccactcacagcccgtttgagccccagctccagcagccatgggggatccctcaccttcccacagttcagtgggaacaacgacccctcactgcaggaccattcgggtcagttgaactgacttgtgcatattgctcccagcaggcatgggctctgtgccctttcctgtgttcttggagacacttggggccttgccagtacagtgtggccaacgggccagaatatccgctgggagccctttggaaatgcagaatcccaggctccacccagccctgccccgtcagaatctgcattgtaggaagatttgttcctggtggccggtgtgcacattcccatgtgggccgtgctggcccagggctccctgtggtgtgcctctgtgtagatttcacctggctctggaaggccctgagaatagctctgaagatgatcttaggtggctttttttttttttttgagacagagtctcgctctgtcgcccaggctggagtgcagtggcgccatctgggctcactgcaagctccgcctcccgggttcgcgctattctcctgcctcagcctcccgagtagctgggactacaggcgcccgccaccacgcccagctaatttttttgtatttttttagtagagacagggtttcaccatgttagccaggatggtctcgatctcctgacctcgtgatccgcccgcctcagcctcccaaaatgctgggattacagtcgtgagccaccgtgcccggcctaggtggcttttaacccagggaactgacagtcctctgaagccgcccaggtattgggagagggagaggtggctgtggtctgagctcagcaggagccatcagatcagtttctggttgggcccccacatttcacacctgggcatctagggaagagacagggagggctcacccctctggcttagtggacatcgtttcacccccagccgggacagtgctcagcaaggccgtggctgagaggcacccatgagaaggtgagaggcccccactgcccctgcttataaagcatctggggagggcacattgccaggcagcaggagggaggccagcactcgtttgactgggccagcgtccctttcctgggcccctgtgctgtgctggggtgaggcgggaagggagaggatacagcccccaccctccctcctagagctcactcctgggcagacgagccaggcagcacagatgtgccatgaacagggatgtccagggtgcagtgcatgggcctacagaggaagaaccagccttctctggcggcccggggacccattagggaaaaaggaataggaagcgcccagcacacactgaccctgggaggcaggggctggctcctgtggcagaagggaacatctgtgccagacatctcacctacattgccttggtgagttcattcacaggcctccattacacaggagagaaatatcaaggtttctctagaaaggtttatttcatgggccaaggcttgtgtttccaaagccaggaagggctgaagccagaattggccctggctgcttgccacagagtctggccgggggaccctggacctcagcagggtcatgatgaggtcagctttggaggagcagggccagtgtgtcctgctttctgctcctggaatgagcctcactccctccctgctcaaggcagcccttcacccagccgccgggacaggtgccctgtgccacctgccatccctgtgattctccatctcagtgagtgctccctggggcctgggagcgcatctggctggtgactcctgtgtcccaggtctagcttggaccaggagctttgtagcccaccatgggccaagtaaacggctgggagtggggatagggaaggctctgagggttgtgagggttagggggtccctccatgaaccaggatcttccaggcagcagccccagcctctgaatgctccttaactgtggccgccatgcagtggttgccacatccaagaagaacgcgtgcgtgtcgctggtcttttctttcctctataaggtggtgcaggtgagtctcgctcggaggggccgtgggcttgggtggaggttgtcttggctctgcttgtggacctccccatacctggccaccctacagagagctgtggcatccccagggagcactggggctggaagcccaggaagtgggaaaggggagtcccaactccccacgcctgtggaattctatagctcacgttgctcccctaccgtggggaagaaaggaaagtgaacaggaaaaggtagggctcagagcaggggtgccctgaccctggaagggacaagcaggggtcagcgagctttggaaggatgtggggtgaccagctggatggggctggaataaccagcagagctgcagagctgagcccacctcagaatctcccagggggctctcaaggcacagatgcctgacgcccaccttggagagagctgacacgccaggcccaggctgccagtgagacacagatagcagccagggtgaaggcgccaggacaggtgtatgtgtggtgcagctagggaggccagcgtgcgtgtggcagagtatgaggctgaggtcagctgggaagagggcggattatacaggagtgtggatttcattccacttctgatgaaaggtagtggagggctttaagcaggagactgacaagacgtggtttgatctaaagcagcctctctggctgctgagcagaaggaggacttgaggccagtgaggaggctgctgctggcttcccggagaggatgggcctggccgaggtgggctgtggggctcacgaaagtggggaacaggacccaggaggcctgtgctgggcctgggaaagctttcatccctcactgatgctgcctgtgcagaatgttggggaacaggggcaagcctgggcggtgagggcttggggaaggagccgagggtcacctgggaaggccccacgtgcaggccaagggctgccttcactggaccggtgatgctgtcacaggcagggctgggcctggctgtgctgcctgtggtttccaagcagaggccgggtgatcacagtcctgaagcgcgcaggggtcagcagatcagagaatgggggatgcgggaaggggaaggtcctcacccaagggttgggctgtgcctttctgttttagtgacgctccttccttcagcatttgtgcctgcaaaagtgcttctaacagcccctcttctttggcgtcccttccttaaccttctgagctttccattgaaatggggaagatgcatcaagctttccactgaaatggggaagatggcagctcatcaggtccttgcctgagtcactccagactcagaaagggatgacagttacagtcgctcaggaggggctgcctgtctgcgggtgtctgggcagggaagagaatgggaacgcagagcttctgaaggcctcgggacatctgcagtggctccagcctggccccaccccacagccagccactgctgtcctgccccataacctgggtccagggccctgtagcacaccaccgagcctgggaagtaggctgttggtaggacttagcgggcaaatgaatgtgtgcaagcgttcattcattcctcatccgtccgctcaatgatctgcctcccattcctccctccctccccaaccgccacaggtgttttccgagtacttcaaggagctggaggaggagagcatccgggacaactttgttatcatctacgagctgctggacgagctcatggacttcggctacccccagaccaccgacagcaagatcctgcaggagtgagtgggcaggggtggggcctggggccaggcctgggcggtgtcatgacatcgacgtcatcaggtgtggaaacagaaggggcaaatttgtgttcatgttgtcccccacctgcctcccacctccagcagtattcgggtttttactaagttgctcttagtggttttaattcgtttcctcctctacgcccccacataaccgtgcttttcctgctcctcatctttactctccatccacacagatgccttcagtaccttgctactaaggagtcacctcccttgtttttactgtcataaaatgagactgtgatcgaaatctcccctctttggaatcctgcccttcagataagaagcaatgtgaattaagtgcttcctgggggccgggccccagcacttcacattcactcgattcacagcctccccgtataccgtctccccattttacaggggacaagcaagcagactcccagagaagcctgtgttcctaaccgctgcacctcctgctccttcagcaggatggggtcaccaggttacactccgaggcgtcagttccatccacgtgctcagcagggacgggaagcagctcacacccacttcttgttttccttcccaacatggtcttcttggtcccccaaaatgagcacttcagcctctataacttgagtgtattggcttttggaaattgtgaagatttttctgtatgaagcagccccaggtgaaccagaggctgccttttctggagctgctgaaatccaagggctattttcaagtcggtcagaacctgccctgtaccccccacccaaccctgccgaaatgtcaaggccagaagctgtggcgttggtgcgggtaccacctccttcactctgagcgtgtggccccacaggtacatcactcaggaaggccacaagctggaaacaggggccccgcggccaccagccaccgtcaccaacgcggtgtcctggcggtccgaaggcatcaagtatcggaagaatgaggtgttcttggacgtcatcgagtctgtcaacctcttggtaggcctcttttctttccttcttctgtagggttttatctcttccacgatagaaataaacacagcattttaaaactggcaaagccccgagagccgttctgtgtggtaacagatagcaggattcagtttgggccactcattgaaatgtgagtttgtcttatcttttttttttgagacggaatctcattctgtcgcccaggctagagtgtggtgacacgatctcggctcactgcaacctccgcctcccaggttcaggcgattctcctgcctcagcctcccgtgtagccgggattataggcacccgccaccacgctcggctaaagcttgttttctttattagcatttatgctgactgagaatccatacatgcacattatttttaaaaattagaagcagggtatgaggttagaaagtgaagggctcttatcagtcaccatgcacagaaaaaaaaaaaagaaactaaagggctcctataatcagaaagattaggatttattcaccgtcaccctctcgggcctcattctgtagacagacagaaacaagtatattgatttttctataaacctgagatcataagatgtggttctcctgcagcttgtttttttggtggtggttgttgtttgggttttgattttgcgttcagtgttactgttttgtatatttttttcttttggttttttaattatgaggaaagttgacgttttgaaaatgaattttagcgcttgtacagatttgtgtacccatcaccacacccaggacacagaacctcaaaacctcctcatgttgcccctttgtagctccatgctcccctcttccccatttcctggccaccattgaactgttctccatcactggagtcttcatcgtgttgtgattgtcacacgagtggcatcatatgtcaccgcagctgtctttctgagattgtcgtatgaatggcgtcatacagtcatgagctctcgagtctggctgctttaactcattctaattctttgcgattcatccaaatccaattgttttgcatatcaaaagtctgttcccttttatatttatttatatttattttctgttctgaaccacagaaggacatttgggtggttttccaatctttggcaattgtcaatagagttgctagaaacatgtcgtgtccaggtttatgtgtggacataagttttcatctctctagggtaaatacccaggagtgggatggctgggtcacacggtaagtgtatgtttacctttataagaaactgccaaaccattgctgttttgcattctcgccagcaacagatgagggttgtgatgaccccacatcctttgtcagtagttttatttttgtcatcctaataggtatgtagtagtatgtcagcacagttttgtgttttgtttttgtttttgtttttgagacacagtctcgctcttgtcgcccaggctggagtgcaatggcactatctccattcactgcaacctctgcctcccaggcttaagcgattctcctgcctcagcctcccgagtagctgggattacaggcacccaccaccaggcctggctcatttttgtatttttactagagacggggtttcaccatgttggccaggctggtctcgaactcctgacctcagatgatccacccgcctctgcctcccaaagtgctgggattacaggtgtgagctaccacgcctggcctattccattttcttaatggctaataatgttgagcattgctttacatgtttctttgtcatctgtatatcctctttggagaaatgtctctgtgcatctttttagcatttttaaattgggttattttcatatagttgagccttgatagttctttgtgtgttccagatagaagtcctctgtcagataggtgatttgcaagtattttcccccagtctgtagcttatctttttattctcttagcagtgttttttttttttcgacagagtctcactttgtagcccaggctgtagtacaagtggcatgcttggctcagtgcaacctccacctccgggcttcaagtgcttctccagcctcagcctcccaagtagctgggattacagacgcatgccaccatgcccggctaatttttgtatttttagtcgagacagggtttcactatgttggtcagggtggtatcgaactcctgacctcaggtgatctgccttcctcggcctccctaagtgttgggattacaggcgtcggccaccatgcccagcccccaatactatattgaataggagtggtgagagagggcatctttgtcttgtgccagttttcagggggaacgctttcagcttttgcccattcagtatgatgttggctatggatttgtcatagatggctcttattattttaggtatgttccttcaaaacctagttagttggctgggcatggtagctcccgctctactaaaaataggaaaattagccgggcgtggtgatgcgcgcctgtaatcccagctactcgggtggctgaggtgggaggatcacttgagccccagaggtagaggttgcagtgagtccagattgtgccaccgcactccagcctgggcgacagagcaagaccctgtttcaaaaaaaaacaaaaaacaaaaccaaaaaactccagtttgttgagagtttttaacatgaagagatgttgaattttatcaaaagccttttctgcacctattgagatgatcatgtagtttctgtctttagttctatttatgtgatgaatcatgtttattgatttgcatgtattgaaccaaccttgcatcccagggataaaagccttcttgattgtggcggattagctttttgatgtactgctggattcagtttactagtattttgttgaggatttttgcatcaatgttcatcaaggatattggcctgaagttttctttttttgttgtatctctgccaggttttggtatcaggatgatgctggcctcatagaatgagtaggggaggagtccctcctcctccgtttttttggaatcatttcagtaggaatggtaccagctcttctttgtacgtctgatagaattcagctgtgagtccgtctggtccaggttttttttggttgttaggctatttattactgatgcaattttggagctcattattggtctgttcagggattcagtttctccctggttccatcttggaagggtatatgtgtccgggagattatccatttcttctagattttctagttagtgtgcatagaagtgttaataatagtctctaagggttatttgtagttctgtggggtcaatggtaatatcccctttgtcatttctaattgtgtttatttgggttttctctcttttcttaatagtctagctagcagcctatctatcttattcattcttttaaaacaccagctcctggcttacttgatgttttgaatggtgtttttgtgtctcagtcttctagagttcagctgtgactttggttatttcttgtcttctgctagctttggagttggaggcttttgcttcgtgagttcttttagttgtgatgttaggttgttaatttgagatctttctaactttttgatgtgggcatgtagtgctgtaaatttctcttaacactgccctagccgtgtcccagagattctggtctgttgtatctttgttcttatttgtttcaaataatttcttgacttctgccttaatttcattatttacccaaaagtaatttgggagcaggttgtttaatttccatgtaattgtatgggtttgagtgattttcttagttttgaattctatttttattgatttgtggtctgagagagtggctggtatgcttttggttcttttgcatctgctgaggattattttatgtccaattgtgtggtggtttttagagtatgtaccatgtacagatgagatatattctctcgtttttgggtggagagttctgtagatatctatcaggtccagttgatccagtgctgagttaaggtcctggatatctttgataattttctgccccagtgatctgtctaatactgtcagtggggtgttgaaatctcccactgttattgtgtgggagtctaagtctctttgtaggtctctaagaacttgctttatgaatctgagtgctgctgttggctgcatatttatttaggttagttagatcttgttgaattgaataccttaccattatgcaatgcacttctttgtctttttttgatctttgttggcttaaagtctgttttgtctgaaattaagattgcaactctgcttttgtctgttttctatttgcttggtagatttttctccatttcttcattttgagtctgtgggtgttattgcatctgagatgggtcttttttttttcttttgagacagagtcttgctgtgttgcccaggctggagtgcagtggcgcaatctcggctcactgcaacctctgtcccccaggttcaagcaattctcctgcctcagcctcccaaatagttgggattacaggcacgcgccaccacgcctggcggttttctatttttagtagagacgaggtttcaccatgttggccaggctggtctcgaactcctgacctcaagtgatccactcgcctcggcctcccaaagtgctgggatattacaggcatgagccactgcacccagccaagaatggtgtcttaaagggagcatatcatttggtcttatttctttatccagctcttgccactctatgccttttaattggggcatttagcccatttacattcaaggttagtattgatatgcatgtatttgatcctgtcattgtgttgttagctgtttattatgctgacttgtttgtgtggttgctttatagtgttacttgtctgtgtacttaaatgtgtttttgtagtggctagtaatggccttttctttcctttttcttttttttttttttgagacaaagtctcactgggtagcccaggctggagtgccatggcgtgatcttggctcactgcaacctctgcctcccaggttcaagtgattctcctgcctcagcctcccgagtagctgggactacaggcgtatgccaccatgcccagctaatttttttttggtatttttagtagagacagagtttcaccatgttagccaggatggtctcgatctcctgacctgacctcgtgatccacctgccttggcctcccaaagtgctgggattacaggcgtgagccactgcacccggcctttttttttttttgagatggagtcttgccctgtcacccaggctggagtgcaatggcatgatctctgctcactgcaacctctgcctccctggctcaagcaattctcctgccttagcctcccgagtagctgggattacaggtacccaccaccatgaccggctaatttttgtatttttagtagatatggagttacaccatgttggccagactggtgtcgaactccacacctcaggtgattcgcctgcctcagcctcccaaagtgctgggattacaggcatgagccaccacacccggccttcttttcatatttagtacttctttcaggagctcttgtacagcaggtctgctggtaaacaaattccctcagcatttgcttgtctgaaaggatcttttttattcttctttttttttgagacagggtctcattctgttgctcaggctggagtgcagtggcatgatcatggctcactgcaacctctacctccctggcacaagctattctctggcctcagcctaccaattggctgggactataggcaggtaccaccacacccggctaatgtatatgtttttggtagagatggggttttgccatgtttcccaggctagtctcagactcctggattcaggcactccacccacctcggcctcctaaagtgctgggattacaggttgagccaccacacccaagttgaaaacgatctcatttctcctttgctgatgaagcttaggttggccagatgtgaaattctggattggaatttctttaaaaatgtttaatatattggccaggagtggtggcttacacctgtaatcccagcactttgggaggctaaggcgggggcgggggggggggagaggggggaggggggaggggaggggatcacctgaggtcaggaattcaagaccagcctggccaacatggtgaaacctggtctctactgaaaatataaaaattagcagcacgtggtggtgcatgcctgtagtcccagctgcttgggaggctgaggcaggagaattgcttgaacctgggaggcggaggttgcagtgacctgctgagatcccaccactgcactccagcctgggccacagaatgagattccatctcaaaaaaaaaaaaaaaaaaaaaaaaaaaaagaatgtttaatataggcctccaatctcttctggcttgtagggtttctgctgagaggcccactgctagtctgatgggcttccctttgtaggtgacctgctatgtctctctagcttctttcattttgaccctggacaatctgatgattatgtgttttggggatgatcttgtgaagtattttgcaggggttctctgcattccctgattttgaatattggcctctctagctagactggggaagttctcatggatagtatcctgaaatacgttttccaagttgcttccattttccccatctctttcagggacaccaatgagttgtagatttgctctcttttttaatcccatatttcttggaggctttgttcattccttttcgttattttttctctattctcatctgactgtcttatttcagaaagccagtcttcaagctctgagattctttcctcagcttggtctgtactactgttaatacttgtgattacattattaaattcttatactgtgtttttcagctgtatcaggtcagttacatcattttctatcctggctgttttgtctgccagctcatatattgttttattataattcttagcctccttagattgggtttcaatgttcctaatctcaatgatctttgttcctatccatattctgaagtctatttctgtcatttcagccatctcagcctagttaagaactcttgctttgggaggccaaggtgggcggatcacaaggtcaggagattgagaccatcctggtgaacacagtgaaaccccatctctactaaaaatacaaaaaattagccgggtgtggtggcgggcgcctgtagtcccagctacttgggaggctgaggcaggagaatggcgtgaacccaggaggcggagcttgcagtgagccgagattgcaccactgccctccagcctgggcgacagagcgaaactccgtctcaaaaaaaaaaaaaagaactcttgctggagaactactgcagtttggaggaaagaggacactctggttatttgagttgtcaagagtccttgtgctcgttctttctcatttttgtgggctgatattcctttagtctttgaagttgctgtcctttgaatgggtttctttttcctttatcctatttgatgaccctgggggtttgattgtgtataaggtgggttcagttggatggcttcattattggaagattttaggggaccaaggctcagcttaggactcctgaactgcatgctctaactctggaggactggtatccagccctggctttgatctctggctccttcaggttaagaacctgctctgctagaggggccaagctgctcccagacagctggtcacaacactccaatgggtggtgccaggcaaagcacttcatagggtagtggcagcaggatctgttcttgtttgcatgtgccagcggcagcacagcggggtgcacgcttatcggctgtgacagagtgctagtggatgtcagggagccagcctctgggagggcatttgtagcagcagcagtagtggcagtatggctggggtgggggcaggggccacgctggcaactgtgcacctgttcattggtgccgatgatggggttagcatgggggcactggtgggtgcaggactgtgtgtgccctttgtgcatgttcacactggcagcagtggctgctcagggctaggggtaggtcctctgttttctctgcctagtttcctgtgggaggcccagcataggtggggaactgggaggggtggggctggcgggctctatgctgccaacactctgacaacaacggtggtgggagaggagaatgaggggctggggtgcacttatgctggcaacagtggcacagcagggtgcacacacaggcatgctgttggggaagggtgggctaggtccacccacgcacacaccaccagcaaaacaatattgagggtgcctgtgggcaagaacctgcaggcaaaactgcacaggggaggctgcagtgggagcggggctcaggtgggctagtgtgtccatggggccgctgtgcaggagtattccccgttcaggtacagtctgccagtgcaggagctctgatgccgcccccaagaggtacctggggattgcactgcaagcaggcttggccaggctggggccccaggagaggccagcagactgagggttgctcaggtcagaccagccccatctgatgggcaagactaccctggagagttcaggtctgacagttcccctacggctaaagtctcctatgagagcaagtcaagcctaggggatgggtgtcctggctgtgctccaccacatatgcttctgcatcaaaccccctggcctggcttaggctggagttctgccccgcctgaggtaggaggcagaactcgacttaggaggtgaggcttggacaccagaccaaattgaggctagctaaaagaggtcagggcagaagcgcctccccataagacccaccccacagtgtgctatgtcagtttgccattgccgtggcaacacttggaagttactaccctttttcatggcaatgacccaacaacctagaagctaccacccacattctagaaatttctttataaactgccccttaatttgcatataattaaaagtcagtataaatgtgactgcagagctgcctctgagctgccgctctgggcgcactgcccatggggtagccccgctccatagggagcagtgcctctgctgccgtgcacatggctgctttagtaaaagttctgtttatcaccaccagctcgcccttgagttctttcctggctgaaaccaagaaccctcccgggctgtctcagttttggggctcgcctgccctgcatcactaccacttctttaagcagcttcccctgccaacgcagctggccgtggcagtcgaggggtccttcctgccgggattccagaggccatggcaagagtgggttgccccttgctagttcaattcaccccctccacaggagtcactgggagccaggaatgattcctggtgcacagtagccctgtgcagggttcccagcctcctcctctgccttccatccagcctctatgtcttccctccgttcactctcagggccttcccactgaagatctaggagtctaggagtgcacctgtctgcacagtgtccctgtctcttagtgggagatgtttctcctggctgcgtctagttggccatcttggagcaggagcaaaatctaggcagtctttaaacagcttcaaattagggttctcacaaacccctctttgggtaagcaaggtatagagggaagggacccagagcttccttgccctctctggacacaccaccctccaggaacctccacgtgttcagctctctggaagcttcttttatctcttttgctttacgtcttccctcactgagacttccagcacagtgttgaatatgagtggtgagagctgacattcttgctttgttcctgatcttagagggagaccattaagtcttttgccaccaactaggatgttagctgtaggtttattataggtgttctttttcaccttgaggaagttcccttttattgctagtttgctaacagtttttttttttttttaatcatgcgtgggtgttgtattttcttcagttctttttctgcatcaattgatgtaatcacatgagttttcttcttttggttgttaatatggtgtattccactgactgctttctgattattgaaccagtgttgcattcctggaataaaatcccattggtcatagtgtattataggttgagtatcccttatacaaatgcttgggagcagaagtgttttggatttcagatttctttggattttggaatatttgcatatgcatcatgagatatcttagggctgggacccaggtccaaacgtgaaattcatttttgtttttttgttttttttttttttttgagatggaatttcgctcttgttgcccaggctggagtgcaatggcacaatctcagctcactgcaacctctccctcctgggttcaagcgattctcctgcctcagtctcccaagtagctgggattacaggcacctgccaccatgcccggctaatttttgtatttttagtagaaacggggtttcaccatgttggccaggctggtctcgaactcctgacctcaggtgatccacctgcctcagccttccaaagtgctgggggaattcaggtgtgagccactgcacctggcttcatttatgttttatatacaccttatgcacgtagtctgaaggtaattttacttttcccttggagatgctgaataaactgcattgtgcacctgcattttgactgcaacctgtcacatgaagttgggtatggaatcttctacttttgacatcatgtcagggctcaaaaagttttggattttggagcattttggatttgggatttttgaattaggaatgcttaacctgtattctttttatgtattgctggatttcctttgctggtattttgttggagatttttggatctacactcataagagatactggtttgtaattttctcttttttgtaatgtttttgtctggttttggtatcaaggtaatggaggaagtgttttttcctcttccgttttctggaagacattttatagaatccatgttaattctttaaacatttgttagaattcaccactgaaactatccgagcctggagatttattttacaaaatgcttttaactattaatttcaaaaaaaagtgttttcttgagtcagggcttcgatctgttgcccaggctggagggcagtagcgtgaacacagctcactacactttgactccagtgatcatcttgctcaagtgatcatcccgcctcagcctcccaagtagctgggactgcagccgtgtgccaccatgcccggcttttggggtttttttgttttttgtgttttttttgagacagagtcttgctctgtcacccaggctggagtgcagtggcgcgattacagctcaccgcaacctctgcctcccaggttcaagcgattctccagcctcagcctcccatgtagttgagattacaggcatgtaccaccacacctgggtaatttttgtatttttggtagagacaggatttcaccttgttggctgggctggtcacaaattcctgacctcaagtgatctgctcaccccggcctcccaaaatgctgggattacaggcatgagccactgcgcccagccctaaaaaggtttttttaaaagccattcttgtagaggaggtctactggctacacattcccttggctttcctttaagaatgtctctatattttacctttatccctaaaggctattttcactggatatggacttctgaattgacggtttttgtttagcactttaatatgttataccacttccttctggcatccatcatttctggtgagaaatccacagtcccccaaatctttattcccctataggtgatgtattattgtcctctggctgctttccagatttttctttgcctttagtttcagcagttagatgaggtgtgcacatctttgtgtttctactgtttgggatttgttcagcttcttggatctgtaagtttatgtctttcatcaaattgggaagttatcaatcattgtttcctaaaatatggttttttgtttttttgttttgttttgttttttgagacagagtttcattcttgttgcccagtctggagtgcaatggcacaatcttggctcactgcaacctctgcctcccaggttcaagctgttataagtaaaatgtttattcagaaacagaatgcttgttcctcggtaccacaaggaaaaatcagcattcaaacaaaaagttttctcagcaaggcaaatttactttctgcagaaagggtgctcctcgcagatggaacaatggcgagagcacacccgaacaaaggaggaaagccgtttttatcccttatgcagcttgtccctgctgctgtgtcctatctccattggctggagccagacctcacaatctaagctaaacctgactggctaataacttaaaactttcctaaatagataaaggcaagggagaacaaaggaaaaagaggaagttgactcattcccttatatctaacatcccttacatctaaaaacaaatatcttggttaaagtacaaggacacagaatgtactcattcccttatatctaacatcctttatgtctaaaacaaatatttcggttaaagtacaaggacatagaatgtacattatttctaacacttatgatttattctttagtgagaagggaaactttgaagaggaacttttttactttctacaaagcaattctcctgtctcagcctcccgagtagctgggattacaggcattcaccaccacacttggctaattttgtatttttagtagagacagggtttctccatgtcgatcaggctggtctcaagctcccaacctcaggtgatccacctgcctcagcctcccaaagtgctgggattacaggcatgagccaccgcacccagccctcagatatgtttttgtcattttactcttccttcaggactccagtgacatgaaagacctttggttattatatcatgtgtccctgaggctgcttattttattctatcttttcttctctctgttagattggataatttacattgaactgcctttaagttcacaggtcctttggccctttcctgtttatctccattctgttattattattattactattattattattattttttttttttttgagataggttcccactctgtcatccaggctggagagccatggagcaagcatggctcactgtagccccaacctcctgggctcaagcgatccttctgcttcagcctcctgagtagctgggactacaggtgtgcaccaccaagcctggctaatttttaaaaaaaaatttttgtagagatgagggtctctctgtgttgccctggctgatctagaactcctggggcaagtgatcttcccacctcagcctcccaaagtgctgggattacaggcatgagccactgtacctggcctccattctgctattaagtccattgagcaagttgtttatttcagttactatatttttaaaaattttccatttgattcttctctttttgtttgtttttgtttttgtttttgttttgagacagggtcttactctgttgcccaggctggagtatagtggtgcagttatagctcactgcagcctcaacctcgtgtgttcaagtgatcttcccatctgagtgtgctgagtagctgagaccacaggcacgcaccaccatgcctggctaatttttttttattttttattttgtagagaccaggacttgctgtgttgcccaggctagtctcgaactcctggttgattcttctttatcatctgtttctttgctgagactttctattttaacatttgttgcaagcatttgcaattttaaaaatagctgtttaaagtcttcatcagataatcccaacatctgtgaagtgttgacagtggttgattgggttttccaggcaagttgacattttcgtggttgtttgtatgctgagtaattttggattgcatcctggactttttgagcattatgtggtgatactctaggtcttatttaagctatatgggaaatattgatatttttgttttagccaacagccaatcttactttcaggccacaagttccaatccccaacctgtaggccatgagcatcacgtcagtttttaaagcccccgtgccatttcctggtcagatctcctgggcgtgcactgcccagtggtcattctgggacccgagtggttagttcagttctcaaactctttcgtaagtcaaactatggtatatgcacaggattcacagatgctcgattctagagagttctggagacataaaccacttcatggggtgactttcctgagcttctggctctgtgctgtctacctggtacttttctgattccttgcggtttactgttgtacacgtctgccattgggcccacttcccagcccacatggagagaggacagagagagaaaaggacaacggttgccccaccccctcggaacagtagctggcaccacagggcctggggcatgaggaacaggggagatggggggcttctgtgttttccaggagagtcaggagttcctcttctggccccagagccaggcctggaggctctgctgagctctcgtgtgctctgtggtgcacacttctgcttccagattgctgctgcactttctcgtggggggcggtgggaacactctgcattcgtggctcttccctggtccacctgctgctgtcttcagtcttccggcagctgccaagcctcctgcccaggtttcagagctgtagtcagtggcaggggaaggggcgccagccgacctgcctcaccagccgcttgctttcttttgtgttcacgctggcctcatccctgcggtgtgggtggactgtatgggctcagccaatccagtcatgcaggtcactcaggtcccgtttctgacggccactggcagtgcagcattgagcacgcttgctcagccccagacgtgtgcacttgggtgtctccgtgacctgggccaggatttctggaggactgaggctgcagacatggaattgccaaggagagtgctgcccagaaagactgtctcgcgcactccgtgcagacctcttcgctttcttactttccgggacgggacagtggcctcgctaaccacattcccctctcccctggggactcttgtctgattgtttattgagccgaaaacagggtccatctgggtgctgtggggtgcaaaggcaagtcccagggggcagcttagagagagtcgagcaggaaagcgctagggctgcgggggtccccgccacagtgcgctgctgcatgtggctccgcccggaaggatcccactcctccaaacaggtcagcacaagggcagctgtcaggatgccaccttcctaagtggcttgcagagctggtggctgggtcaacatttgcctccagatgcgatcatctgagtgcagcctggtacttacacagccgggccctgagcaagcatcccttcagcacccgccctgggaagggcaccggctctgcgtggctggtcacacctcagctgagaaggttctgattgctgcccgcagggccgagatcagcctcgtgggctgggcagcttttcagctccactccctgggcctgctctcgcggcattcacgacctcatgtgttcagttacagctggctgccagggccagtcccaactccctgagggggaggcagcacccaaggggaattaggggccgtcacagtggagtggagggccctccgagaaagaggcaggcaaaatcccaatgctcgggctcctggagccccggccagtgagggtcccgagctcctgagcctccgcttgcccactgagcacctcctgccacacacgctgtttctggtgctggacacggcagcgcgcagccccacgtggcttcccccagcagggagagagagagagagacaagcaggcagacgcagggaagctgttgtgcaccatgggatcagggagccgcttgcgagatgaggacaggacagcacgaggaggtgaggctggggaaggtgacagaaccggagcccttggggccatgtccggttccctgcccctcccagggctgtcatttgcttggcacctcagttttcccaattccctcagaggcggcaagctggtgaggggcttttgtttgtctacccagtgctttttggacatcatgcataagactgcacagactctcctgccactctgcagacaggaaatgcaggccctgcacatgttagcctggctggagccagcatctgggcccaggtatccaagtcggtggcctttggcccacttgctggtgtgagcatggcctcgtgcagcatagcagtgtgcagtggtggccagggctgcagccccagcgattcttctgccagtcactctgtgccctcagcacggggcctctgatctgtgcctgtttcctcacctctaaaatggatgcaagaagagatgctccagcatcttggctcacgcaggacaggctagggggtgcaggaccgtcgccccggtgtggattttcagttgcactttcagatgcatctcggcatgcgcagtgggttacagcccctcaggtcatctccccacagtccctgccccagaggttgtcgaggcgtgtgtggagcaatgcctggcgcagtggaaatgctgtcagtgttagccactgtgactggatttaagttgattattttggatcaagtgttatcacacttcagggtggccctgagaagcaagaaggggtcaggactcaggaagcaccatctctcataagccctggggggtgaggggccagtggcctccctgggaggccaagaggagaaacagctttcaagaaaagcaagtctggcctggttcaagagaccccagcccagcccagcccatcggctgagcagggaccacagggtcctggcccaggtccagccgagctcatggactctcaaagctgactcagcgtggggaccagctgccgggccggcccggagcattcagggggctcctgggagggagggactggtacctgatagagaaccctcagagggggctccaggcacgcatcatcaggtcccagtgtggcctgaggcctagagggcaggacccacagtgtccacctcatgtccacagggcctcggcatgaaggctggaggggtgagcctggggaccctcagccaggcgtgggttggtgtgggttaggggtagaccttagccacagctgggactctcccagctcaggggatgcccaggagagggatgggcttggaggtgagaagggcgttgagagtggggtggccagagggtcacatgatgtggtaggaggcagtggctggtgagttggggacctcccctcacgcccacaccgccacccccaggtcagcgccaacggcaatgtcctgcgcagcgagatcgtgggctccatcaagatgcgagtcttcctctcgggcatgcccgagctgcgcctgggcctcaacgacaaggtcctctttgacaacacgggccgtgagtacccttgccaagggccctgcccatgaggatggcctcaccaggcacacacattacagcctagggcagggttgggccaggcggaggaacgagctggtttcaagcacttggttgagcagcacttcacactgcttgagacagctgtgtagagtattcatccttccctggacatagaaggtgcaggggagtgaagatcctccagtccagctgggaggcccccgtcacccggcctcacacgccaggtcctgcaccctgccctgctctgcctggggcactggggcctaggctaaggccttgctctctccctcccaggccaggtttctcccctcaccttgggccctaggtgtgggccgtgtgaaggccacgcatggtgattctcgctcccgccgcctggcctctaacacttcccacagcagggcgggggcagaggggcccagggcctggttttgtgaactgtgcctcccactcagctgtcacaggccactggaagagggtgcagtggctgggcatgcccccgttcctagcccggtgagggcttctcgggcatcagtctatcagggcagctccccgcctggggctgggcagggccccacccacatagccctcagtgaggtggcaaaccaaggtaggacccaggaccccgtggatgccagggcctgagcccttggggagccccgagccatcccccagccaagtccactgatcaatcattcagtgaacgtgtcctgagcaggtcccctggctgggccctgggatggccgctggggactcagcatgaaccagacccaccagccctgcccctggggaccccaggggtgtgaggagtgatggggcagttgtcttgggacccagcccccttggtgtttgtggcccaggctgctctcagtgcgtggactgggggccctgctctgccggggtgggttgcaggtggtaggagtactgctgagatagtgacccggagggcccagatctgtcctaccctcacccctgaccccaggcggcaaaagcaaatccgtggagctggaggatgtgaagttccaccagtgtgtgcggctatcacgcttcgagaatgaccgcaccatctccttcatcccacccgacggcgagttcgagctcatgtcctaccgtctcaacacccacgtgagtgcgccaccctggggctgggctgtcggcagactcctcctccccttcacctccaggaggtgaagcccaggcaggcgccagggccagccccaccccacgctccatgagctgcctggctctgcagagatggagtctgaggacttgggactccgagctttctgaggggcacagacccctttggccaccaccacccctttcccaggcagcccccagagcaggccctggtcatgttttctgcatttgccccaaggcctccccggtagctcccggctacctcggcctgtctgccctggccctccctgacgctggctgtacgctccctgcagggctctgggcccacacctgggcagatggtcccttgccctgggccttggtttcccctctgaaatgggcctttgtcaaacaaggccaggtgtgagcaccctctttgccctccttggcaggtcaagcctttgatatggatcgagtcggtgatcgagaagcactcccacagccgcatcgagtacatgatcaaggtgcgtgggccgaggccacccactgagggccttctggtgtctctggcccgtcccaggagcctaaccgagggctgggggtgccgtagggctgccatccgtgcaccctcactgtggcctcagatgcaggagtgacctgacactgaggggacaccgcctggggcctgctcctagatggtgccacttgtggggaggggcctgtagccaggcatccaggacactcccagaggtgttgcccccaggtggagcacctctgcccctcagcgaccctgtccagcgcagcctggccctgggacatagacattgtcctaggagggcagggcagagggagggatgaggagccttggaagctgagcagacaggaggatgaagatgaaactcctgaaattaggtcttgggagagtctcgagggcaggagaaggggtgggtagtgcctggagaagtggggccaggggcggggctagggaggatcccccgggccaggctgaggggcatgtgtcctggagaggctggccagctcaccttggcctccataaccccgggccgcattggcctggcctgcaggccaaaagccagttcaagcggcggtcaacagccaacaacgtggagatccacattcccgtgcccaatgatgccgactcacccaagttcaagacgacggtggggagcgttaagtgggtccccgagaacagcgagatcgtgtggtccatcaagtccttcccggtgagcactctgtccagacatccacgtgccccctgcgcctgtctctgcaaggcagcctgggtgcctcaggaccccctgcacctcaagatggggtgacagtggccactgtgtcttccacacctggggcttctgaaagggtggacggagagctgaggactggagtgggaggaagcagaggctgactcggcccctgggcccctttctgccttcctcttgtttgtgaaccagcctctgtcttcacctcagggcagtgccctctccctccctctctgtgatgcccctgagtactgatgtgagatggggctcctgtccatgcaggccctgaaggagccccgtccacactggcaggtccaaggccctttctgtgcaggctcagccttgcctgccatcaaggggaacggctgcctgtaggccggagcagcacagcctccagagctccgcaccagccgcccatgtcctgggccagctctgcatcggcgtggcttccctgacaacatgttaaggattctgaggagctgagtctgggcttgccgggtgtacacagtgcacagagaggctaggcccaggcatggctctggagctgagccgggtggcactgacctgctccaccaggggggctcagggcaggcgctgctttccatgttctcccctctctctccatctgcatcccagggggacttggggacagccccagctgagttaagctggaaatgctgcaattcaagtgccttgaatttcatgatggtactttccctcccagcctcagtctaatcacatgacataaaatacagaaagtagaggaaggagagagaaaagccagttaccccaccacctaatactcccgtcagcctttccgcgtgtctcctcacctttctttctgcgtattttgcttttcctcattatgtgcaagtagagccagctcagtgcctgcccttccacgtggcgctgcggcagagcgttttccttctggtattgactgtcttcttggcggtcacctttgggagctgtggatattccatggaggggtggtgaccatcccggatagttggattagctcctcttttcctgcaattccactgttgaaaatagtgtttatcatttaaaacacactgggagaatacttcatcaaataaacagcatggtgagctgtagacgggggaggaagggacagggctaagggccgagacacaggctggcgtggactgtgcttgtgtagattttacttcgaagccatgcacaggcacacctcattttattgtgcttcccagatactgcatttttatttttgttttagtttttaaacaaatggaaggtttgtggcaaccctgcgttgagcaagtctgttgatgtcattattccaacagcatgtggtctctgtgttgtcactttttagcaataaagtatgttttaactaaggtatgtacattctcctagacataatactgttgcacattcagactacagtatacggtaaccttttttttttttttgagacggagtctcgctctgtcgcctaggctggagtgcagtggcacaatctcggctcactgcaacctgtgcctcccaggttcaagtgattctcctgcctcagcgtcctgagcagctgggattacaggcatgtgtcaccacgcctggctaatttttgtatttttaatagagacggggtttcaccatgttggccaagctggtgacgaactcctgaccttgtgatccgcctgactcagcctcccaaagtgctgagattacaggtgtgggccaccgtgcccggctggtaaacgtaacttttacatgcactgggaaaccaaaaaatgtgtgtgacttgcctaactgtgctatgtgctttatggcagtggtctggaaccaaacctgcactgtgtgaaggtacacctgtcagtgcttcccatgcatagaaaacaaaattaaatcacaatggaaaaaaggtaattcctaaaaaccaaaagcaaaattaattcatcagcgtatcaagttgatgacaaccacagagacacgtcacttcaaataacacaccctaaggacaaaaggaactgcaaaaaataaattttaagaaatacagagagggccaggcgctgtggctcacgcctgtaatcccagcactttcggaggctgaggcgggcggatcacaaggtcaggagatcaagaccatcctggctaacatggtgaaaccccgtctctactaaaaatacaaaaaattagccgggtgtggtggtgggtgcctgtagtcccagctactcgggaggctgaggtgggagaatggtgtgaactcgggaggcggagcttgcagtgagccaagattgcaccactgcactccagcctgggcaacagagcaagactctgtctcaaaaaaaaaaaaaaaaaaaaaaacacagagagagattagaaatacagattagatagatagatagatatccttccccctttcttagattgctccatactaaaagtttttttttttttaggttagttttttttgtttctgagatgaagtctcactctgttgcccaggctggagtgcagaggcacgatctcggcttactgcagaggcatgatctcggcttgctgcaactccacctcccgggttcaagcgattctcctgcctcagcctcccaagtagctaagattacaggcacatgccaccacacccagctaatttgtgtatttttagtagaaacagggtttcgctattgttgctcaggctggtctcaggtgatctgcctgcttcggcctcccaaagcactgggatgacaggcgtgagccaccatgcctggcctattgtgaataatgctgctgtgaacgagtgcacaaatacctcttcaagatccagcttccatttgttttgggtgtatccccagaagtggaattgctggatcatatggtgattctattttcaactttttgtggaagtgccatagtgtaggctatttgcttttaaacctagagtgtttctcagtcctgtccctactgctgtctgttaccaggttagggaatttgatatgtgcccatgggtggccatggcacatgacactgtccacctggatggagatctgggccgggccttgcgtccaggccttctcctggctctctctgcatctcctatagcacctgcttcacagaagttgctgccatgttacttcatgcgtgggtacctgtgactattgtgttgtccctgtggcttatgggacggcagcctctaggattgtggcctgtcctcctgtgcacctttctcccttgtgatgatggcagccctgtcctcttttgtctgcctttggcagcacgcctgtcaatgcctgttcttcctacccggggagcccttctcactgtgcctttgtggcgtcgagtgggttttggtgtgtgagccggcgccagcctacagctctcatcgagagcagaattaaacccactcggctcaacgtgacgacacaggctgggtgtgcaggcctccatcgcccctggcgtctgcttccctgcattttctttgtttgtgttttccatttggtctttgctaaggttcagatttggggtctggctgagtgtttggggcacaggctagtcaccgagcgggtttgttccctcgctgcctgctttaccagttgctgatgtcgcatcttccccccgtcatcctcctggagtctgtactcagcacatgtcaccaagtcaggcagagtcctcactctcacgctgccctggtggcagtaggcagagatgaaccactcggccctgccccaggtgcacggggaccgcccctgctgtgaggcagaaacagccctaggcggcagtagctcccacggaacctcggcctgagccctggggagcagagactgtggggtcccaggcacagccagagctgagatcgtgcccccgactgctcagggcgagaccaggcgctgggggtgaccaggctgcaacctgttgctcctcaaggcagagagagggtgaaggtcacagccaggactcgggttccagtcagagccacagccaccccctgctcaccctcaggagcaggacccagggctgaatcgtcactcagtgcatgctccttggtttcttccttttgtcgcctctccctggtcatggttctcacctggacactctcttttctttcacatgctgttctgagactgggcgtgtggcccctgtccccagcagccctcccctgccacggtcattacacactcttccttcccatggccggtctgtctagttcaccagccttggaggaaagtgcattaggggagctgggcggggggtgctgggccactgcagaccacactggcaggggcttggtgactggggctggcagcttggtgagctcagctctgggcgcctgggtatcctcatggggcagctgggcaccccagagcaggggctgtccttaccagcctggggcagcacagggccgagctttggctccccagcacaggggctcatgctcccctccctggactggggtgagtggtcagtctctgcccatcgccactagggccagagctgttggctaagctggggcagggcctaggcctgagcgcctcccccgtctgctccccagggcggcaaggagtacctgatgcgggcccacttcggcctgcctagtgtggaggccgaagacaaggagggcaagcccccgatcagtgtcaagttcgagatcccttacttcactacctccggcatccaggtacgtaaggcccaggcggccggggcccagaacagggacagaggccgcaggtgacagatatcaatgcagccagcttgggaaagggtgtcagtcagctgcaatcaggaccctgctgtgctgtgggcctctgcctccccacagacagggtgaggccaggctgcctctgctcagccctgacccctgagctcaaagctcactcattctgccccaaactagcatttgaggctctgccgtccactcatgccccatgggacctcttttccctggcaccccctcaaaagcccacagagggaggagaggctcccagagagccaggggccttctggccgggccccccaagcaggctgctgaggccgtgtctgcaagccacatcctggctgctcaccacttccagaggcggctctgccctcccacacatttgcatggtccagacaaatccctttcacccccctgaggcctgtgctcatcctgtcgtcatggcctcccctgccagccccaggctgccccagcaggaaagattaaggggggaccaacagggcgggagcctgcggtgctcagggccctgctacctgtgccccaggtgcgctacctgaagatcattgagaagagtgggtaccaggccctgccctgggtgcgttatatcacgcagaatggaggtgagtgaggccctacccgtggggtggggttgtactgaggggtcctctgtggctgcccccagggtggagccatcgggtcgggtcccgaaagcagggagggtgcagagcccagcatgacgcctccctcctgtctcctagattaccagctccggacccagtgaggggctgtcgcagccaacaccccggcctcggggctcctggtggcagcaccaggggacacacctgccaaacccaccagatggaggggccctccctggtctctggccaccctcccagcctctgcccagggacccctgccttccccaggccatctgctctgccgtcgacactcgtctcagaagcccctttcccagaagaggctggtcttcaagaagtctcgtttctttgcccctgaagtcagtttcaggggaaggatgtgaaatttttccgtgtagaggttacagccttttatgctgttgagctcccaggtaccaaaaagcttggccaacgcttgccagccagccagctgcaggtggcatctgccacgaaggaagcgccagcctcgccaggccagcaggggcgtcgttttgttgccattttgttgaacgttatgggtttatgggtgttcctggaacttgtctttgtgcattcgttgctgtttgtgttaccctcactgtccccatgtcccacccacgtcctacggcactcaggaagcacttggtgaggacgagccctcacccttcttgtcttccttcccggcagcgcccgcagcgggccatttacacgtcgaggctggcacctggcgcgctcgggggccactgtagcgtctgcctgctccctggactcgcaggcctcgcctgtggcgccttcccagggccagcctgggtcacgagatgctgtcactcagccagatcagtattgacccaccaggggaggtggggtttggtgagagacgccagcctcagactttttcccactgagggtccagagagcggggccacgtgtcacccacgtctgcgcttggtcacccgtcctccccaccctgtgtgtgtttatgtcatagttacattaaattccattcattgaatactccacagccttcctctgatgcagcgtggtcccaactcctcctgcgtgaccacagggcttgcctggttttgtcgccgaccttccctgtggccccacgaggtgtcaccagctccctctgcttccccagctgaaacacaggaaaagcagctgcgggaagaggcagctgcagtgctggaccatgggccaccactcctgggccacacagaggaggccacagaggcagagtcttctctcatccaatctgctgcaccctcagatggccaacagcttgtccccacctctccccaaactgatggcccactcagagcatggtccttgtgtccacagcagcatcccctgtgtcctagctagaaatgcaggttcgtgggccagccctgacctgccaaagtggaggctctggggccagggtcccggaaaacattaacaaggcccccagatgcttcttctgtgaactgctacttggtccatgggggaaatagcacatatgcaggaagtgctgcctgctcttggccccctccccgaccagtgctgatggccctgcctggccagcaccctcttgccttcattctccccctccctctcctgtcttgccgagctcgtcctcaggtgtctagtgggcatccgacctaacagcctgagtagaaccttccgcccacgtaggtcttccccatctcagtcaatgacgctgccccagcccaggcctcagaccaaagccctgaaggcatccctggggcccctcccctcactgtccacacccatatcagcagccagccctcatggcccctccagaaaaccctggggctgaccccatttgccatcctcgctgccacccccggggcctagctccagtgtgggctgtcactgtccccaccctgtggagcccccatgctgggacaccgcagggacaggagagggctggtccacaggacagaagagagacttcagtttccagcaacttatcagataagacctgcaaaccctccactacagactgtagaaatgcaggaaatgaagcagacgcacctagccgtgcccataaaaaagcaaggagacccacaggagcccaagacgaaggaagtagacgcggaagacaccgtgggggctcacaccggagttgctcttggaaaccaccgggtttaggtttgggggccaggtggcagataggactttgggcatcgggaagatggtgaaatgcagtggagatgactcctgcgtgaagctgggatcctcgagggtcatgatacttaacagtaaaaagatggactagaaaaaacatttgccctccacccctgagaataagcactgtgtcctctctctgcctgagatccacaggagaaaaagtcaccactcatttagaccccacgcttgtaatatcaatctggtttgcagacaaccaggccaagatgtttatgacagaaaacctccctggagggacctaacttcatgccttgttacctaagatcctcgcacacaatagaccctcaacatgagggcacatcctgaaaattacaaaacacgtgcatgaaagcaaacttgaaacagcaggatcagatcctcacgaacttcaaagattatcggcatgtaaacaaatacactatgcagtcaatctgttgcaagtgcctaaaggcacagagactctgaatagaaaagagcaaaatgctgttaagacagagctgttacaacatccaacaaggcaaataatttgcatgcgggttataacgtctacaaatcagaaaaagagaacctaacaaaatgggctgtgtgtgaacagacagtatgaagaagatgaaatacaaatggcgaccgttcggccaggcgtggtggctcacgcccgtgagcccaatactttgggaagccgaggcagaccgatcactggaggtcaggagttcgagaccagcatggccagcatggtgaagccccatctatactaaaaatacaagaattagccgggtgtggtggtgcgtgcctgtaatcccagctactcagtatgctgaggcaggagaatggcttgaacccaggaggtggaggttgcagtgagccaagatagtgttactgcactccagcctgggcaacagagcgagactccgtctcaaaacacaacaaaaaccggcctagcgcagtggcttatgcctgtaatcccagcactttgggaggctgagacgggtggatcacctgaggtcaggagtccgagaccaacctggccaacatggcgagaccccatctctactaaaaataccaaaattagccaggcatggtggcgggcgcctgtaatcccagctacttgggaggctgaggcatcagaatcatttgaaccccaggaggcagaggttgcagtgagccgagatcataccacctgcactccagcctgggcaacagagcaagacttcatctcaaaagaaaaaaaaaaggcaaacgttcaaccatgtagctattcaggaaatatgtacacataaaccaagaccacagttagatgctatttgcatcatgtcggccccccccaaaaaaatttttttttttgagacagggtcttgctatgttacccaggctggagtgcagtggcgtgatcacggctcactgcagcctcgagctgccaggctcagccaatcctgcctcagcctcttgaggagctgggactacaagcacatgccaccatgctgggccaatttttcatattttttatagagatggggtctcgtcattttgtccacactggtctccaactcctgggcttgagccatcatcctgccttggcctcccaaagtgctgggattacaggcgtgagccacctcgccacgcctcctgaacatctagaacgtgctagctatgtactgactgtgggaaagttgagaacatcctccctgaagtcatctttatgccagaattctcttgcagaactctagttgagaaaagccctgagaagtccatgcaccaatatatagagaaatatcaggtgtacagttacacttacagcagcatagttcatgatagcaggaaattggaaagcaaccaaaagtccttcaataggaaaagggaccactgtagtccattcatgcaagagattacagcagtgaaaatgaattcaactagagcagtgatatggctcagaatacaacttaaacaacattgagcgggaaaaatgtttacaaaagaaaatgcagtaatctagtataaaatacggaaataatattttgcgtgcttagggatctatatatatccagcaaaagtctaacgagatgcttgagaatttgaaaaaattcacatccctggttatctctgaaaggcaaaaacaggaagggggtatgactggggcctctgctgtgttggcaatttccttaagcttggtattgcttagtggcttgttctgtattctttctttatgctttttttttttttttttgacagggtgtcactctgttgcccaggccaaagtgcagtggcatggtcacggctcactgcagcttcaaactcctgggctcaagtgatcctcccaccttggcctcccaaagtgctgggattacaggcatgagccacagtgcccagccctttttgtagttcttaatatactttttgtagtttttttgttttttgtttttgtttttgttttttttgagacagagttttgctcttgttgcccaggctggagtgcaatggtgtgatctcggctcactgcaacctccgccttctgggttcaagcaattctcctgcctcatcctcctgagtagctgagattacaggcatgcgccaccatgcctggctaattttgtatttttggtagagacgggatttctccatgttggtcaggctggtctcgaactcccggcttcaggtgatccgcccccctcaccttcccaaagtgctgggattacaggcatgagccaccgcgcccggccagttctcttttttttttttttttttttttttttttttttttttttttaagactgcaaagctgggcatggtagtatgcacctgtagtcccaactacttgggaggctgaggctagaggattacttgagcccaggagtttaaggacagcctgggcaacatagtgagaccctgtctctaaaacaaaccaacaaaacaccccccaaaaatgacaatgcagatttggaagaaaaaaatagattaaaaatgtagtcataggaattaacaacttggggccgggcatggtggctcacgcctataatcccagcactttgggaggctgaggcggccagatcattttaggtcaggagtttgagaccagcctggccaacatggtaaaacctgattgctactaaaaatacaaaagaattagctgggcgtagtggctcatacctgtaatcccagctactcaggtggctggggcaggagattcgcttgaacccgggagatggcgctcgcagtgagtcaagatggcaccgttgtactcttgcctgagcgacacagtgagacactgtctcaaaaaaaaaaattaacaacttggttggagggtgttaaaatacaagtgagacatagatgaagagaattagtgcactagaagagagctgtctgaggcagttacccgggacatagcacagctaatgagacatatatatatttacagtcaaccctccacatccatgggttctgcatccatggattcaaccaagagtgagttgaaaatatttgaaaaacaattgtgtctgtgctggacatgtacaggttttcttttttattgtcattattccttaaataatacagtataatgattatgtagcatctacattgtattaggtaatctagagatgatttaaagatgatgtgcataggatatatgcaaatattgtgccattttatataaaagacttgagcatcctcagattttggtatccaaggggagtcctggaagcaatcccttgaggatatggagggacgactctgtgtgtgtgtgtgtgtgtgtgtgtgtgtgtatgtgtgtgtgtgtgtgtgtgtgtgtgtgatgtgcgtgtgtggttagcacaagacaataagaaggcccaacatgccagcaagtatctaacacaaaccaaaaaatgagaactggggagcagccacatgcaaagagatcgtggccagaattttccaaaattaatgaaaatcttgaagtgttttttgtttttcattttgacggagtttcgcgtttgttgcccaggctggagtgcaatggcgaaatctcggctcattacaacctctgcctcccaggttcaagcaattctcatatctcagcctcccaagcagctgggattacaggtgcacaccaccacgcccggctaatttttgtattttttgtagagatggggtttcactatgttggtcaagatggtctcgaactcctgacctcaggtgatctgcctgcttcggcctcccaaagtgctgggattacaggcatgagccactgcgcccagcctgaaaatcttgaaattttaagatccaggaaaccgttgagtccaaagcatgatacacaaacctaaattcgtaactaaaataatcatagtcgaaccacagaacatatcagactcagggaagatcctaacagcaacactaagagattaaaatgtctctccaaagagcaattggacagagaactggtttcacaactggaacaacaaaagtccgaagatagagcatggcttcaaattactgagagaagtgcagtctagaattctgagcccacctcatctgtaaaaggtaggacaagccgggcatggtggctcccgcctgtaatcccagcactctgggaggccgaggcgggcagaggtcaggagtttgagaccagccggaccaacaaggagaaaccccatctctactagaaatacaaaattagccaggtgtggtggcgggcacctgtgttcccagctacttgggagactgaggcagacagaattgcttgaaccagggagacagaggttgcagtgagccgagatcgcgccactgtactccagcttgggcaaagtgagattctgtctcaaaaaaaaaaaaagacaagataaaaacaatttatcaataacagattccccgaaaaaaggaacttgtgtacataaggaaaggaagaaagatgtgagaaggaatgccggaaaaccttagaaaccattggatctgtctaaactgtcattgactgtgtaaagcaataataacagtgactaacgtatagagtagcgacaaaaggcgcaactgaagtactagacaacatcctggtgttcatgcctttcaaggtcactatgctatttgggaggagattcggctaaagtccacgagggccacgtatttatatataatttctagaccagtggttggaaaagggttgaaagaaaacttttaacagattaataggaagaaggaaaagagaaggaggcgtagaaaaatcaggaggcactgggcgcggtggctcacgcctgtaatcccagcactttgggaggctgaggcaggcggatcacctgaggttgggagttcgagatcagcctgactaacatgagaaaccccgtctctactaaaaatataaaattagccgggtgtggtggtgcatgcctataatcccagctactcgggagggtgaggcaggagaatcgcttgaacctgggaggcagaggttgtggtgagctgagatcgcgccattgcactccagcctgggcaatgagcgaaactccatctcaaaaaaaaaaagaaagaaaaagaaaaagaacaatcaggaggccaggttcagtggctcatgcctgtaatcccagtgctttgggaggctgaggctgagacaggtgaattgcttgagcctaggagtttgagaccagcctgggcaacatggagaaactctgtctctacaaaaattagccaggcatggtggcgcacacctgtagtccaaactactcaggaggctgagttgggaggatcacctgagttcaggaagctgaggctgcagtgagctgtgattgcaccactgcactccaggttgggtgacagagtgacaccctgcctcaaaaaaaaaaaataaaataaaggaaaaatcaggataaatgcagggatgttctaaactttttaaaataataaataatagtacttaaaactgcactgggacttttgggacacccctagcatctctggctgcagaaagcataaaataagattgtagaaataaatccagatattaggaaccacaacaggtgtaaatgaagcaaagctgctagttgaagatgttgtcggattgaactgaaatacaaaatcctgtgatatcctgtttatacgcgatacatctaaaatgtaagtacacaacacaattgaaagtaaaaaaacattaaaagatgtgacacttaaaatataagcacacaacacagttaaaagtaaaaagacattaaaagatgccaaaagaaatctcatatggttatattaattccagacagaatagatgtatttatttatttattcattcatttaattttttgagatggagtctcgctctgtcgcccaggctggagtgcagtggcgcgatctttgcttactgcaacctccgcctcccgggttcaagtgattctcctgcctcagtctcctcagtagctgggattacaggcatgcaccaccatgcttggctaaatttttttatttttgtattttttttatttttagtagagacagggttttgccatgttggccaggctggtcttgaaccctgacctcaggtgatccacccccactggcctcccaaagtgctagtggcaggtgtgagccaccacacacggccagaatagactttaaagcaagaaagcaaaagaaaaaatgtattagatccccgagaagtttccacacaactccaagaattattattagagttcccactctctgaggaattttcaagagaaattagttagaattcaacaagaaataaattactttaaaatatttccaaatatgagaggttttttttgtttttgtttttgtttttgtttttgtttttgttttgagaaagggtctctgttgcccaggctggagtgcagtcagtggcacgatgtcagctcactgcaaccttggcctcctaggctgaaatagtcctcccatctcagtctcacaagtagctgggattacaggtgagcaccaccaagctcagctattttttttttttttttgtatttttagtagagatggagttttgccatgttgcccaggctggtcttgcacttgggctcaagtgatccacctgcctcagcctccacagtgctggaattacaggtgtgagtcaccatgcccagccaatatgagagattttaaagcacatttttcaatcaccatgtgtcaaagaagaaaatataatggaagttagaaaatattagagaatggccaggtgcagtggctcatgtctataatcccagcactttaggaggctgaagcaggtgaatcacttgagctcaggagttcgagaccagcctggccaacatggcgaaaatccatctctactaaaaatacaaaaattaaccaggtgtagtggcacacgcctgtaaatcccagctactcaggaggctgaggcccaagaatggcttgaaccctggaggcagaggttgcagtgagctgagattgtgccactgcactccagcctgggcaacgaaacgagagtctgtctccaaataaataattagagaatatttttcaatctggatgcaggtgacatgggtgtgctctcgagaatccatcaagcattgatgatttgcacactcttttgtgtatatgttacacttcagcaaaaacattcacaaaggggaaaaaggcaaaagatacttaaagcagccagaggtaaagacacatcaccttcagacatgacaaccagacagacagacagctggcttttcaaaggaacccagaaaacagttgggtgacattttcaacatgctaaaagaaaaccactaacccaaatcagagacccagcaaaagtatttcaagaatgaggttacagtaaaaacattttgcagacaaataacgaaagagtttgccagcagcaggctaacactaaagaaaattgtaaacagtgtactcacatcaggcacaaggaaagtgatctcagacggaagggcatgatgcaagaagaaataaaagcaaagaagtagaaaatacatgagaaaatctagacaaagattgcataaacagtttctggagtttttttaagtgatagaattatacaacaggaaaaaaagtctgcagggagtaaactgagttaaaatgttccaagttaatgactgtctgggaggagaataaataacatggatacactttgggaggccgaggcgggcggatcacgaggtcaggagatcgagaccatcctggctaacacggtgaaaccccgtctctactaaaaatacaaaaaattagccgggcgcggtggcgggcgcctgtagtcccagctactccggaggctgaggcaggagaatggcgtgaacccgggaagcggagcttgcagtgagccgagattgcgccactgcagtccgcagtccggcctgggcgacagagcgagactccgtctcaaaataaataaataaataaataaataacatggataaaatttgttgtttgttgttgttgttgttgttgttgttgttgttgagacggagtttcgctcttgttgcccaggctggagtgcaatggcgcggtctttgctcactgcaacctctgcatcccgggttcaagctattctcctgcctcagcctcctgagtagctgggattacacgatgcgccaccaggcctgcctaactttgtatttttggtagaggcggggtttctccatgttggtcaggctggtctcaaactcccgacctcaggtgatccgcccgcctcggcctcccaaagtgctgggattacaggcatgagccactgcgcccagccaaatctgcattttgataagtatgcattttactatctaagggagctaaaacatttttattattttagcactgtaactttgcttttcttctttgttttgtttttttgagacagagtctcactctgtcgcccaggctggagtgcagtggcgtgatctcagctcactgcaacctccacctcctgggttcaagcaattctcctgcctcagcctcctgagtagccaggattacaggtgcacgccaccacacccagctaatttatgtaattttatagagttgtggtttcaccatattggccaagctggtctagaactcctggcctcaagtgatccacctgcctcggcctcccaaagtgcggggagaccagaattccacccagaatgacctctctgttcctaggagtgtgacagcatttgggggggaaaatagcgtagagttggaatttttaaaattcagtttgacaaaatgacttttagctggagcattaagtccctttacatttaatgtaataactgatattacatttaagtataaatttaaatctaccgtcttactttgttttctatttttgtcctttctatgttctcttttatgtcctctctggatttattacagattgtttgtggcttttaaaaaaagtcattgcttgaatgatgagagcttatatttaaaaaggcagggggctaaaataaataaataatttaaaaaataaaaataaagtcattgttttcctttgaatgtttgagagttacaattctaggctgggcgaggtggctcaagcctgtaatcccagcgctttgggaggccagcccaggtggatcacctgaagtcagcatcgtgaaaccccatctctactaaaaatacaaaaattagccgggcacagcggcatgtgcctgtaatcccagctactcgggaggctgaggcaggagaatcactcgaacctgggaggcggaggtttcagtgaaccaagatctcaccatttcactctagcctgggcaacaagagcaaaactccatctcaaaaagaaagaaatatatatgagtagatattaaatgtgtacacatatatacatatataaaggctaaaataatgatctaagcctccatctcaagaagttagaaaaagaacaacaaaataaatgtaagagcacagaaagaaggaaataatagggagtagatacaaagaaaatggaaaagaaacactcaataaagaaaatcaacaaagtgagtttatttaaaaaaaaatgaatgaaattgaaaaaccgctagggaaattgatcaacatgaaaagaaagcacacatagctgttactggaattgggttgggggagacattactatagatttaaagacattaaaacgattagaacaggacacatgtctagggttgtgtgaggtattcacttcccaagggtagagagcttctgctcaccaagctgtgatccctggcctagagttccagccacatagcgagaaaggggtttctttttctaattcacaaaacacgatacaggctagtggacccccaaataaaagaatatttagaataaaaccctatcaaaaaaaaaaaacaatagctagaacagtatgaacaatgctaggggctgggtgtaggtggctcacgccggtaatcccaacactttgggaggctgaggcagctggatcacctgaggtcaggagtttgagaccagcgtggccaacatgatgaaaccccgtctctactaaaaatacaaaaaattagttgggcatggtggcaggcacgtgtaatcccagctactcgggaggctaaggcaggagaatcgcttgaacctgggaggcggaggttgcagtgagccgagatcacgccactgcactccagcctgggcaacagagtgactctgtctcaaaaaaaaaaaactacacttgatcttagccaaaaggccaagacacgataaaataataataataataaatgatgctaaggaaaagagtgacttgctgaaggacgttgtccccattatgtgtgcaaagtttaaaattacatgaaacaaaatgatgtattatttatggccaaataataaaagatagagccatcatcagcatgtctgtgatggcctaagaccatcttttaataaagattgtaattcaggtcattcccctcccctgctcaaaatcctcccatggctctccagtgccctcagagtaaagtccccgctcccttgtcctccgggtccagctggtcctcctctggcttccactctcgcctttcctccctcttcacctgccactcgcgcctctttgccccaagcttgttctcacctcagaacctttgcagttgccagtgccttctgtctggtgcacccttgcctccgctgcctccttgaaattcattgctcaactcaagtgtcccctcccctccagccactccagcttgtcgaaacatgcagctgtgatttgttccacttttgctggcacacccctggtctgcctagaagttccacaaggacacccccgccccatctgatttgtcactgctgtgtctctagggtccagagcagtactgctctgggactgggatctggggatgcaaggctctgccagccgtgaccaccagggggcatccacgggtcagaaaccacggcttggagacccacccggccaggccacagagagaggtgtgcgggacaggcctgggaagagggagactccagccctctctgaacacagcgaccccaacaccactgctatccttcctgagggtcctccctgcagcctgatggtgaagatgaggaaactgaggctcagaaaggccacaggggacgggcgcggtggctcatgcctgtaatcccagcactttatcacttgaggtcaggagttcaagaccagcctggccaacatggtgaaaccctgtctttactaaaaatgtcaaaaaaaaaaaaaaaaaaaaagctgggcatggtggtgggtgcctgtaatcccagctactcaggaagctgagacaggagaatcgcttgaacccaggaggcagaggttacagtgagccgagaccatgccactgcactccagcctgggcaacagagtgagactctatctcaaaaaaaaaaagccacagaaatgtcaaacactccttccccctcctcacaggacattgacagggaagctacagatggagggtgggtggggacgctggggtccctggcctggctgggaggaccaagtcagggcagccaggctcagactgaccctgctgtccatgaggagcctcagctcacacaggcagcccaatccctgcctgggttcagcagctcccattgcacacatggggaaactgaggctcagagacaggctggagctggactctgtacaccagaacccggcaggtcctgccacaccattgctgcccaacgaatcctccccagctgccatctgtgctggggcttggggactcagtgtggacgacagcaggcgggtgcccctcacccacttcccaccagttccctattcaatagatggagaactgagtctgagcccacccagcttcatccaggggctacaaactcagactaccccccacaagaggaaacgcccagtggcctgcccctggagtgggtagggaagccccgtgttcaaagctgtgccccacaaacctggctccccgtgctgtgtgaccttgaacaggctccttgccctctctgggcctgtttctctgtccactgggggcctcttcatgccattttgttagaagagtctctaaaagaagaaaaagatcacttgtcaaccaattaagaactgctcagatgctctttctaagcactgaggttcttttacatgacacaaagaccctgatatggccagtgcgctgttgtttattgaaattgaggtgaaattcacataacacatggttaaccattttattttattttattttttatttgagacagggtctcactgtgtcacccaggctggagtgcagtggtgcgatcacagctcactgcagcctcggcctcctgggctcaagcgatcctcccacctctgagtagctgggacaacaggcgcatgccaccatgcctggctaatttttgtagttttgggtagagacagggtgtcactaggttgccagggctggtcttgaactcttgggttcaagcgatcctcccgcctcggcctcccaaagtgctgggcttacaggtgtgagccaccgtgcccggctacagttaaccatttgaaagtgaacaattcagtggcatttaggacatttgcaatgtcgtgcaacctctgtctgattccagaacatttccatcaccccaaaaggaaaccccgtccccatcagcaatcactcctcattcctcttccccagccccaggtaacaccaatctaccttatgtctctatggatttgcctgttctaggcatttcatatcaatggaatctcacactacgtggccttttgtgtctggcttctctcactcagcattgtggggatttatttgtttgtttgtttgttttttgagacggagtctcgctctgtcgcccaggctggagagcagtggcacgatctcagctcactgcaacctctgcctcccgggttcaagcgattctcctgcctcagcctcccaggtagctgggattacaggctcccgccaccacacccgactaatttttcgtatatttagtagagaaggggtttcaccacattggccaggctggtcttgaactcctgacctcaactgatccgcccgcctcagcctcccaaactgctgggattacaggtgtgagccaccatgcccggccaacatcaggtttttgaggttcacccttgtcacggcatggatcagcgctgcattcctttttacgggtgcataatatcccactgcatggataactcacattctgtgtatcagttcatctgccaacaaaaatgaaggctgttaccacctttcagacatcatgagccatgttatgaactttcacacacaagtgtctgtttaaacacctgctttcaattattcccggtatatacccaggaatagactccctggatcatatggtaatgttaggcttaactttctgaggaatttcacaatttcaccgtgtgtgtgtgagtatgtgtgtgtgtgtgtgtgtatgtgtgtgtgtgtgtgtgtgtgtgtgtgtgtgttttataaggcccctggccaaactgggaatatagtgcctagaaatttctggcaagttcttttctctgagcgctttcctctgcatcaacccgtccctcccaccagagcctgctcgaccctggctgaccatagtccccttccaaagcgaccccagcccgcccagcctcagggcagtatctgcacctgtgttatgtccccatcatccatgctttgaatgctactgatattttgtatacttaaagtgctacccaggctgggcgcggtggctcacacctgtaatcccagctctttaggagccgaggcaggccgatcacctgaggtcaggagttcaagaccagctgggccaacatagtgaaaccctatctctattaaaaatacaaaaaattggtcggacatagtggctcaaacctgtaatcccagaactttgggtggccaaggcgcatggatcacctgagatcaggagctcgagatcagcttggccaacatggtgaaaccccgtctctactaaaaatacaaaaattagtcagacgtggtggtgagtgcctgtaatcccagctactcaggaggctgaggcaggagaattgctcaaacctgggaggcagaggttgcagtgagccaagatcacgccactgcactccagcttgggcgatagagggagactcagtcttaaaaaaaaaaaattagccaggtgtgggggtgcgtgcctgtaatcccagctactcaggaggctgaggcaagagaatcacttgaacctgggaggcagaggttgcagtgagccgagatcagaccactgcactccagcctgggtgacagagcgagactccatctcaaaaaaataaaaataataaataaaataataaataaatatataaataataaagtgctgcccaaattgttttgttttagagattataaaaacagaaaaagggggtgggcacagtggctcatgcctgtaatcccagaactttgggaggccgaggcgggcggatcacgaggtcaggtgatcaagaccatcctggctaacagtgcgaaacctcgtctctactaaaaatacaaaaaattagctgggcatggtggtgggcgcctgtagtcccagctactcgggaggctgaggcaggagaatggcgtgaacccaggaggcggagcttgcagtgagccaagattgcgccactgcactccagcctgggcgacagagcaagactccgtctaaaaaaaaaaaaaagaaaaagagagatgacccatgacccatctctcttcttggagctcctgtgggctcaggctggagaaagttagtgggtgtgtccttctgattagaggacccctcaccacccagactcttctggcaatctccagcttattttacaaagcccagctctgatgacccctccttcaggcagccctcctggatctcccaggaaggtcctggctctggcttatccctgactattcagagctgggctgtgtcgtgaaaggcctcagtgctctcttcctttgctttgcctttttttttttttttttttttttttgagctggagtcttgctctgtcgcccaggctggagtgcagtggagcgatcttggctcactgcaacctccgcctcccaggttcaagcgattcttctgcctcagcctcctgagtagctgggactacaggcgtgcaccaccacgcccaggtatttttatttatttatttgtatttttagtagagatggggtttctccatgttggtcaggctggtctcgaactcctgacctcaagtgatccgcccgcctcagcctcccaaagtgctgggattacaggcgttagccatcatgcctgaccagttctctttctttggtgctcacccttttgtccaacaccccagagacgcttctgagacccatggtgcttgctgaaagcatctgggcaccttctcagtgctcagcccttgtccaggcccacaggcagctctctgcccagtctgagtgtcccctgaactctccagccccactcctgaccctcattcattcattcgtttgagtatttatggagcacctgctgtgtatgtacagagactcaactgacacagacagacaaaaccccagtcccggggagtcatgggatgggagacagatgaccttgactgtcaccacatggcacatgggttgtcgggcgggcaggcgcaggaggggaggcgaggacacagcaggatggagaccccaagtccctggagacggggccctgtactgggggctggggctgtgaggagggcacgggggagccacagcgggttctgggcgtcaaggccacctctggccgccgatgggagagggaggaacccgggcaggagggaggtcagggcgccagggcgggagcagggagcgatggtggggccccactggagagcgggtggggagggaattgtgggatttgggtgcagccagagagagtggaagaggctgaggccagcagggttgtgggggtggggaggtcatggggtgagggtggcgtggaggggcccccacaccctttgggcagcatacacatctgaccaaagattcagttcctcaaaaatgccacattggcgcgtgtgtgcacatgggcagagcatgcacacggacacgcacgacacacacaggcacacacacctgcacacagagacacacgatatacagagaggtatacagacaacacacacaacacagacacacacacacaacacatggatgcacacacacacagacacacaacacacagagacagagacacagagacaccacacaccacacacatacaacacagagacacacacataacatatgcacatcaaacacaactacgctcaacatagagacagacacacacagagacatgcaacacacagagacacacacagagacacacatacaacacacacagacacatacgcagagacacacaacacacagacacacagaaactgacaacagacacacatacaacacacacgtacaacacagagacaaacgcataacacagatgcacacatacaacactcacacacatcaaatacaactacacacaacacagagagacatacagcatacagacacacatataacacacacaacacatgtgcaacacagatataacacatagatgcacaccaagcacacacaacacacacagacacacaaaacaaaactacacacacaacacacagacacacaacatgcacagagacacaagcatacaacagccacagagacacacagacaccatgcatacaacacagacatacacatacatcgcttgaacccggaaggcggaggttgcagtgagccaagatcgtgccactgcactccagcctgggtgacagagcgagacaccgtctcaaaaaaaaaaagcccattttgcagaagaaaactgaggtcagagagcagaggcaatgtccccaagctctgaatagtcaggagtgagctggagccaggaccttcacgtggcagggacacagggcaaggactggcacgtgccagctcccaagacagcaggctgggagcctccctgcagcccagaacattcccatccccacggcagttcctgcagggcccctcccccgccccgcctgccctgacgctgagctgagcacatttcccatcccacccctggctctgttccattccaagagaaacaggttgcacctgcacagttcccagaaggccctgggcagcaggaggccagccacgtgagtgggtgtgtgtggagacgtgcagtcacattgcagcccccaccatgccactgcgcaggaggagcagggccacgggtaacagagccactaagaggggcgtgtggggcactgagcactcaagcactggagccagccagacctgagtaccacccaggctcagccacttgccagcctttacctcaaaggagggaggagggttttttttttttttttttttttgagagtctcactctgtcacccaggctggagtgcagtggtgtgatctcggctcactgcaacctctacctcctgagttcaagcaattctgtctcagcctccctagtagctgggattataggcatgtgctaccacacctggctaatttttgtatttttagtagagacagggtttcaccatgttggccaggctggtctcgaacccctaacctcaagtgatctgcccgcctcggcctcccgaagtgctgggattacaggcatgagccactgcgcctggccttcttctttttttttttttttttttttttttgagatggagtcttgctctgtcacccaggctggagtgcaatggcacaatctcagctcactgaaacctctgcctcccgggttcaagcgattctcctacctcacaggagggttctatgagggggcttgggagatgtgtgcaggaggggccccagcaggccgggagagctacataatataacataaagttcaccatttttaaagtgaacaatttggtggcattcagtacattgacaatgtcatccaaccatgacctccacttccaaaggagacctcatccccatcagtagccattccccattcccctcccccaacccctggcagccactcctctgcttcctgtccctatggatttgcctgttctgggcattttatatcagtggaatcctacaccgtgtgtccttttgtgtctggcttctctcactcagcaccgtgtttttgggggctcatcacgctgtagcatggggcagtgcttccttccttttcatggctgcattgtattccattgtgtggatgaaacatgttgtgttgacctgttcacttgttaatgggcacttgagttgcttccactttggggctattgtgaatagcgctgctgtgagtgcatgtgtctgtgtatgtgtgtgtctgtctgtgtgtctatgtgagtgtgtgtgtctgtgtgtctatgttgtgtgtctgtgtgagtgtgtctgtgtgtctgtgtatgtgtgtgtgtctgtgaatgtgtgtgtctgtgtgggtccatgtgtctgtgtgtgtacgtgtgtctgtgtgtgtgtgtacgtgtgtctgtgagtgtgtgtgtctgtgtgtgtgtgtatgtgtgtacaaggatttgtttggttcttccaacacactttttgtgttctatgaccaggagatccaagtaactcaggcccttggagggaggttctgatttactgaaaaaaaaaaaaaattccacattatactcatgacttgaaaaacattaaaagagaaccaaactggctggttgcggtggctcacacctgtaatcccagcactttgggaggcagaggtgggcagatcacttgaggtcaggagttcgagaccagcctcacaaaaccccatctctactaaaaatacaaaaattagccggtcgtggtgttgggcacctgtaatcccagctactcgggaggctgagacaggagaatcacttgaacctgggaggtggagattgcagtgaggcaatatcgcgccactgcactccagcctgggtgacagagcaagaatctatcaaaaaaagagagagaaagagagggagacccaaaccaacagttttccctcacccctcgcccctcagcccctccctatgttgcggctcaaaagccccaaacccaagccagggagtgggggaccagtgcgtgggcagacactgcatcctcaagggtgaaccatcccgggaaactgtagcccctctgatgggagggaaggagaggacaacctcagaacgtctcaaagccaggctgcttcgggtcacaggcctgagtcccaaagcaggactgagctggaggacacaaggacctccctgaagccacggggcaggcaggggcaggagacccagtttcagacccacctggaaccttgggagtggcctttagcttcccctctctgtgtggctgctgccaggctcccagcaccagacactggctcccaagtatccttctggtccctgaagttgggctgatgagagaaaaaggtgaaccctctcccctgccttttttttttttgagacggagcctcgctctgtcgcccaggctggagtgcaatggctccatcttggctcactgcaacctcagcctcccaggttcaagcaattctctgcctcagcctcctgagtagctgggattacaggcacccaccaccacgccctgctaattttttactttttgtagagatgggttctcactttgttgtccaggccaggctggtctcaaactcctgtcttccagtgatcctcctgcctcagcctctgaaagtgctggcattacaggcaggaagccactgcacccggctgaaaaacccttttagtatcagagcacaggggctgggtgcagtgacatcacacctgtaatctcagcacttcgggaggctgaggcaggagtatcgcttgagtaggagtttgagaacagcctgggcaacatagtgagacccccatctcttaaaaaaataaataaataagttaattaaccagacatagtggtgcatgcctgtagtcccagctactaggggggttgaggtgggaggatcgcttgagctgggagttggaaactgcagtgagctatggtagcacctctgcactccagcctgggcgacagagtgagaccgaccctgtttttttaaaaagagagagagagaatcacaatgtaagtgaatagtgtaatattaaatttcagcgtatccgttagataaagaagtgtgggtatgatgatttcgcagaacatagtgacaagaaatgtgtcacacttataccacattaaggatgttgaggccaggcgtggtggctcacatctgtaatcccagcactttgggaggctgaggcgggtggatcacctgaggtcaggagttcgagaccagcctggccgacatggtgaaaccccgtatctactaaaaatacaaaaattagccaggcatggtggcagatgcctgtggtcccagctacttgggaggctgaggcagaagaatagcttgaacctgagaggcagaggttgcagtgagctgagatcacgccactgcactccagcctgggcaacaagagcaagactccatctcaaaaaaaaaaaaaaaaggaagttgagttatgttactctttcatgctactttaattttgtttcacactatctgccaaaataaactctttcctataacttaagatgtgggtgtatatgtatatgtatacagatgtagatgcgtgtaatttattatatactgttaatttcactatttgggttgtaataacattattttgaaataaaaatataattgttcagattgtggggtacatctgaagcccttagtccttatcgtgtcctcttccggaagctgagatcttggtcagcaggtgcagaggaaagagccaggtttcagagccacagaatcagtttctcttggaatctcaggttccttctctgtgaaatggggatagtgacactctgactccaagcattcacacatgctgttccctcagcgtggtcatcccttccgtgtcatttgcctggagagctcctacatatcattaaaccccaactgtgatgtccctcctccaggcagctgccgcagacagatgctccaaattctctcatccccacccgccttccaaccgagccctgatcctgcaggctgtggccatctgtgtccagctctgtctccctgagactgggggctccttgaggactgggctaggggacacaaggggatggcgagtgttttataaaaatggagatgccaggctgggtgcagtggctcacgcctataatcctagcagtttgggaggccgaggtgggtggatcacctgaggtcaggagttcgagaccagcctggccatcatcgtgaaaccccgtctctactaaaaatacaaaattaaccaggtgtgatggcacatgcctgtaatcccagctactcgggaggctgagacagaagaatcgcttgaacccgggaggcagaggttgcggtgagccgagatcgcaacattgcactccagcctgggcaagaagagcaaaactccatctcgaaataaaaataaaaataaaaaataaatgaaatggagaccccagtaccccccgttgatagataagagactgagatttctagaggggctcagcttccctgggggacagctgtttagacccagagccaattttcaactcttgggcagccagactgcaagtccagtgctccttccaaaacttgtgtgtatggagaacccaccacctgtgccctgaccccctcctggttccccacagcccctgcccaggccaggacaccctgtcccctgggtgtccctgaggtcacagataaggccgctgggcccggctatcggcaggaaacatcttggcaggacaggaagcgcggcatgggtcagccgcgcctgcacccggctcagcctatcagcggccagatattttgggagccactatataaaccccaactcggctccaagctgttccccggggaagcctcaggcttcatgttctgcggcagccctgaggctgctggaacacggggcccgggaggagctcaggagctgagcgggacagagtgacaggggtggactccgtccgggcatcactgcaggccagagggtgctggctctgaatcgagctagcccctattcagtcctggtgcagacactctcacttgctgggcaagtggcttcaccgccctgtgcctcagtttccccctccccacatccctcctttgatcctgtcccagggaaaaacacacctccaggtcctggagccttttctgaagtttctgggccgacatctgagggccaacccactttctcccaatgcaaagcagggcccaggaatctgcatcttaaaacctgccttggccgggcacagtggctcacacctgtaatcccagcactttgggaggctgaggcgggtggatcatgaggtcaggcattcgagactagccttgccaggatgttgaaaccccatctctactaaaattacaaagattagccgggcatggtggctggtgcctgtaatcccagctactccggaggctgaggctggagaatcgcttgaacctaggcagcagaggttgcagtgagctgagattgcaccactgcactccagcctgggcaataagagcaagactccgtctaaacacacacacacacacacacacacacatacacacacacacacacacacacacaacagggatccatacgcaagcccaagcttctcaagttcaagaacatacggtgggtccagctcctccacccaaaaagttcagtggacaggcacccagcgtgacaccgcataactgctgaatttgagccacattataagaatgggctgtagttattcccattttacagaagaggggttgaggcccagagaggggcaggaagttgcctgaagccacacagcagcccagaggccacgccctatcagaatctccaccccgtgcacctctcaggagatgctccaggggtgatgtggccagccaacaagcagtggggttaggatttgaacccgggtctgcctgctccacgaccccttgttggcacagaacagtgccatcttgggcccagtgatgactgctctggtcctgaataacatgcatatttctcccaggaccagtaaaagtgaaacgaagaagtgaaataaaaatactcaagaactcactggggcccgcagccggctcctgacctcagagcctcggcctttcctggggagaggcaagggggcaggacggcagcgcgggcagaggaacccaagcgtggctatgtaaagtggccggcccagcacctgcgactgcctgccagggcaggtgatgaagcgtgcccggccggcccccaccccaggcagctgcagctggcaaaagggaacagccacaccacatataacctggcctgaactccacccaaaaccagagctcgaggcctggcccgtgcctggaaagccagttttggcccaatgactctgggcaggtcactgtccttctctggatctcagtctccccactggccacagaaaagtctcagcagtggcagaggctcctgcctgaccattctgaccatcccagaatggaaagggaaatcacctccctcattctggagcctatacctctaataatataacccatgggcctagcagcttgctgggcagctatgtcacaggcaatgggccccttcaggtgtccctgaagtcctcatccctgcccacctttctttaagatctggtggggactgggggtcaagatgtcttctagttcatgccacacaaccacttggctcagtttgctgccagggaggcactggactggcatctctttcctgacgacatgctcactgccagccggggcagcctagtgtgtggcttagtgaaagtgggtgcctccttcagagtggctcagtccccaccctgccctgctctgccatccagccacctgggactgctgacagagacctaagtcagtccttctctaggttaaatgccctaaagcctccagggccttctcccaggacaccacttagaagtgtgtatacacatacacacacacacaccatggtggtcttccccaaacctgccactatccatctatccccattttgaagtggcagggccccctgcctgacagcattgaccagcccagaatggagagggaaatcaccttccccattctggagtctatacctccagtaatgcaacccatgggctcagcggcttgctggacacctatgtcataggcaatgggcccgttcacgtaaccattcgtcaattccaaatattgagccccacaagggagctttgatgaaggtggtggggatggggatgtcttgtttctttttctctctcttttcttttttggtagagatgggatcttgctatgtacccaggctggacttgaactccccctggcctcaagcaatcctcctgcctcgacctcccaaaatgctaggattacaggcatgagccaccaagcccagccggagtgtcctgtttcttgagctggctgctggttacctgggcatagtccctttatgagaagttacagaactgtgtacctaggatttgggtactttaatgtctgtatgttttccttgaataaaatattttaaaagaagaaaaggaaagaaagcagtttgatgtctcggactgagaatgaaagctaagtagataataactaggtgaggtttgagggcatggatggattcgggaagggcactgcaggcaagaggcacggcgcggctaaggcctggtgtcctgaggcagccttggtgtttgagggacctggcagaggcccgtgtggctgggtgggggcagggaccagccatgcagaccctcaaaagccacagcagggtgcatggatgttaccccgagacaggtgccaagccgagaagtttaagtggaggctgatgattaagtggaatggacatgtggaagggcggttgaagccatgagcaagggcatttatgattgagtggtaaagggttgctcagcccatctgccagaggggaatactgaggcccggtgaatccaggctgcttggctacaagtaggaggtggaggggcaatgtgagcctggcccagctcgcccaagggccactttctcccagctgcacccacttggagagtggtcacaacctctgtgcccaagaatcagccagatctcccaagtttgagtctcactctgagctcactggcctcagtgtcctcacctgtcaaacgggggcctgggagggtgagtctcatcttcgacccctctgcaggcagcccagcgactctttaccacggatttcactgcgattccagccaagagtgcctgggcagtggagggggcatttcataacccgagcactgcagaggtggcttttctgagaagcccggccccaaggaggaaactctctgatcttcgaatgccgtgggggtgggggtggcaccctcagcttgcaccaggaaaaactctgggggaaggggagaaggtaggagttctaaaaagaaataactcagtaatgcaaattcagccgcattgggggaaatggaagaagtaaaaaggcactgatgagaagggactcgtgccacacgcagggcagggggttcggggacaccatctgggcagatcaccacccaggcacccttgccacagctcctggccttacctcgagcctttatccgggctgcaccttgacctggggtctccttcccctaaacctccccatagggaatctttctcttctctgacccctaaaggcgacctcataccctttcaccagtcacacccagttacactgtgtcccccagctcctggccatcactaagccaccttctgtctctacagatttgcctgttccagacacttcaggcccctcagtatcacccccactgtggtcttgtcttcaactgtggtctctccagagtcaccttggttttctgccttttgctcgtccatccccaccgctacccgtgggagggcaggacccagctggctttctccctgcttctccatccatcctacttctgactccccagcctggagcctggcaccgaaaggcgctcagtaaatatttgctggctgaatacacggggtcaggcccaccttatctttagcagggagtgttatcagcttggctcgggaccaaactccagctcagcttgggccatccctcctacaagccccagttcttctcagctaaacaacaggtctggggggtgacacttctcgccaggggtccccaaagataacccacagcacatagaaagccaggcacacctggcatggcgcagtggctcacgcctgtaatcccagcactttgggaggacggggcaggaagatcacttgagctcaggagtttgagaccagcctgaccaacatggtgaaaccctatctctactaaaaatacagaaattagctaggcgtggtgaaaggtgcctgtaattccagctactcaggaggctgaggcaggaagatcgcttgaacccgggaggcagagtttgcagtgagctgagattgcgccactgcaccccagcctgagtgacagagcgagactgtctcaaaaaaaaaaaaaaaaaaaaaaaaggccaggcacaccggagatacccagccactgtcatttcccccaggggtgtccccttgctgatccctggatggggctctgtcttcctcccccaccaggcaaagagaggataaaagtgaccagtgaggctctgaaggtgctgggttctctcccccacctccagctctttctaagaagccaatggtgataacattcccccaaaacaggaaccagcgaggggcaccctgtgttgcagaaacctcccgcagaagctgcccacccagcccccgaccccacggccggcttcagggcccgctgggcacagcctggaaagatttttatgtaaaagtggtcgatgcaaatccagaaacctggggaccatgaaaagatccacttcccctttaacccactctggcctgagttgctgccacctgggcacggctgctggacataggcctccctgacccccgctcccgtttgccaagccggcttccagcacccacagcgcttaggacttgctctgcgcaccggaggccccaaatcctggttgctgggctagaggaacagggagcaggaacggctcatgtagacccccaaaccccctgccctgaagcaggaatgatcccagcagctagatctgactttttttttttttttttaagacggagtcttgctctgtcgccagactggagtgcagtggcatgatctcggctcactgcaacctccgcctcccaggctcaagagactctcctgcctcagccttccaagtagctggcattataggtgcccccccacttcgcccggctaatttttatatttttagtagggatgggatttcaccacattggccaggctggtcttgaactcctggcctcaagtgatctgcctgcctcagactcccaaagtgctgggattacaggtgtgagccaccgtgcctggctgctagctctgacttttaaaaaaaaattgagataaaattcacacaacataaattcaccattttattttgatttttttcagacaggattttactctgtcacccaggctggagtgcagcaggttcatcatggctcagtacagacttgacctcctgtgctccagtgatcctcccacctcagcctcccgagtagctagctgggactacaggcatgcaccaccacacccagctaacttttacattttttgtagagacggggtcacactgttgcccaggctggtcttgaactcctgggctcaagcgatcctcctgcctcggcttcccaaagtgttgggaatacagacgtgagccactgcacctgggttgaatttttaaatttttattttatttatttatttattttgagacggaatttcactctccttacccaggctggagtgcaatggtgtgatctcggctcagggcagcctctgcctcccaggtttaggtgattctcctgtcttagcctcctgagtagctgggattacaggcgcctgccaccacgcccagataattttcttatttttagtagagatggggtttcaccatgttggccaggctggtctcgaactcctcacctcaggcaatgcactatctttggcctcccaaagtgctgggattacaggcatgagccaccacgcccggccaactttttaaaaaattgaaataaaattcacacaacacaaaattcaccatttgctttaaagtatatgattcagtgggtttggggcacactcatgaggttgtacaaccatcacctatacctaatttcagaacattttatcccctcaaagggaaaccccgtctccaactgagttggccacctcagaagtgactgagaagcagtcacttatccccctccccagaaccctgacaaccacaaatctgctttctgtctttggattcgcctgttttggacagccatgaagtgggcaaaataacattgagtgaaatctttgtgatggagaaaaataggtcatgacatggtaggtgggacccggagggtcattttagccgagaaggtcaaggaggttctctctgaggaggtgacatttaagctgagaccagcaggagataaaggagtggctgaagggaacagcatttgcagcagagggaacagacagtgccaagaccctgaggcaggaccatgcctggtgtgatcatggaactgtggggaggctggtgtgttggggaggctggtgtgcaggaggagatggggtcacagggtggccggggccagaccacagagccttgagggcctcagtgagaggtttgtgttttgtcttgttttgttgtttgtctgtctctgagatggagtctggctctgtcacccaggctggagtgcagtggtgcaatctcagctcactgtaacctccacctcccgggttcaagcaattctcctgcctcagcctcctgaatagctgggattacaggtgcgagccaccatgcctggctaatttttgtatttttagtaaagataaggcttcaccatgttggccaggctagtctcgaactcccagcctcaagtcatccgcccacctcgtcctcccaaagtgctgggattacaggtgtgagccactgtgcccggccaggtttgggttttatttcaaacctgggacagggctccgttctccaccactgctctaaaaatatttattgaaagaagagggacataccacagagtcagccctacctttggtgcttcaggccttcaaatggagaccccagggtgcaaggaattcaggtctttgcagaccttcctgtggaagatggaacagtgtgaaactgcatggaacagcatggatgcatttgggaactgcgtggaggctctgtctcctgtaaggcagaactgagttggccgccccagggactgagtccctggccacctcctgccagccacaaagaccgtgctgcccacgacgtgctgttgcttcatggtgacttgactgtgatacaaagaggccaccaacctggacagggaaacctgagctttctgcaagctccccagtaactccaggcctgacaggggctcacttcaatacccccagcccccgtctatgaaataaagggtgtttaggatccatctggcaacggacacccactcgcccaggccagacctagggaggggcacagggaccaacgaggcctcagtttccctatctgtgaaatggacagaaaaagccccgcggcgcatcataacaacccaccaggtctattgtccagccctgggggcccccacatccctctgagcagctttggggtccccaatttccttcccccaagcacacacgcactgtcctctgcccctgaccgcagccgggtcctgatactgttttgttctcaccctgctctcctgacctggtgccaccagtttggtgtcttaaaaaaccacaacttagggtgctgttatctgctatcagtggcgggacgcggtggtttcggggcccctccgtgcacttctcagaagagccagccatgtcatcgcagggtgcttggcacaaagcagcttgtttatcaggccccctcatcgcgatccctgctgataagggccttcaaggcgcccgacaacttgtttacgggccttgttttcagagattctccatttgatgtatcccggtcttgcagcccaggggtcagggcattggggaggggggaagcagggctgggtcgaggggcttctgggaagacttcctggaggaagggatgctggaagggagcgagggagggttagttgcagaagatggggtaggcattgcaggtggaagaacctgcatgggcagaggtttggagataagaaccttgtgacaggctgggggcaggggctcatgcctataatcccagcactttgggaggctgaggtgggaggatcgcttgagtccagaagttcaagaccagcctggccaacatggcgaaaccccatctctacaaagaaaaaaaaaaaattagccaggcagggtgcgtgcctatagtctcagctacttgggaggctgaggtgggagaattgtttgcacttgaccttgagaggtggaggttacagtgagccaggatcacaccactgcactccagcctgggtgacagagccagaccctgtctcaaaaaagtaaaaaaaaaaaaaaaaaaaaaagagcttctggcaaagtcaggttaattaatgagctggggcttatctgaagagcaatagggatttggcagggtttaagctggggagtggggaggttaagagccagggtgaagtttgaatcctggttctactcccagcttcagttttctcatctgtgaaatggggatggtgtgaggattcagtgacaccattcaggaggggacgctggggagaagccacaagcaggttggatgggaggaggagggcctggcaatgccagggaatgcgtagagccagaaagctgattagtagttgcttaaggctgggggctgggatgggaacaggatggaggttgatagctaaaggggaaggggtttccttttgaggtgattaaaatgttctcaaacaggccgggcacggtggctcacacctgtaatcccagcactttgggaggccgaggcaggtggatcacttgaggccaggagttcgagaccagcctggccaacatggctaaaccatgtctctactaaaattacaaaaattagctggacatggtggcacatgcctgtaatcccagctacttgggaggctgaggcaggaggattgcttgaacctgggaggcagaggctgcagtgggccaagattgcaccaatgcactccagcctgggcgacagagagagacaccatgccaaaaataaataaataaataaataataaaataaaatgttcccaaatggagtggtgatggttgcagaactctgtgaataccctaaaacccattgaattggaatctttgttattattattattattattattttgagacagggtctcactttgtcacccaggctgtagtgcagtggtgcaatctcagttcaccgcagtctcaaccttccaggctcaagcaatcctcccacctcagcctcctgagtagctgggactacaggggtgcaccaccatgtctggctaattttcttgcttgcttgcttgcttgcttttttttttttttttttatagagatggggtctcactgtgttgcccaggctggtcttgaactcctggcctcaagggatcctcccgcctcaacctcccaaagtgctgggattacaggcatgagccaccacgcccggctgagctggacactttaaatgagtgaattgtgtggtcgatgcattatatctcaacaaaactgttaaaaaacaaaacagacaaaagaagatcaagaaggcctttttcactttagcaccgggaaacccaggaggcagctctgaacctctggatagaaggcattttgggcagcggctgaaggaggtaggtactgagctccttgtcacctaagccatgaccaggtgagctcctgctgggagccgcaaccacccagctgctcctccgcttctcccagcaggaaaggtgccaggggctgcccctcagatgtggcaacaggagctgggccccccacccgcccacactggggtttctgcgcctttgctacctgtctacctgctaagccacttcctccgcccacccaccagcccgtctgcctggcgcctggcttccccggctccctcgtccgccttgcctgcatccccctacccacctggcttcctcgtgagctgcccatgtaggcaggactgggagaggaccctcctccaaaagccaggatcggagcccagcttagccattgactctctggagctccttcaagaagtgagccttagtttatccgcctgagcaatgggactaaaaatatcaacctcgcaggatggctgcgaggctcagggcctttgcactgtccatcccccccccctgctgggggcaccttctagaatcttcctggaggttgccactggcctctctctcctcctgggaaaaaccctccctgactcccccagctaaatgcaccaatgggccctcttttcccctcgcctcaattcattttttgccctggaacctcagtacctagagctttatttatttgtttattatttttatttttattattattttttgagacagtcttactctgttgcccaggctgaaatgcagtggcgtgatctcggctcactgcaatctctgcctcccgggttcaagtgattctcctgcctcaggagaatcccaagtggctgggattacaggcgcccgccaccacgcccagctaattcttgtatttttagtagagacgaggtttcaccatgttggctagcctggtcttgaactcctgacctcaggtgatccacatgcctcggcctcccaaagtcctgggattacaggcgtgagccaccatgtccagccaataagcagtcccagagctctattgatgactgtttgccagtctactgcttgcatctaacctgagagctacatgaggacagagactgtgcctgtctcaggggcacaggagtggctcagggactgttttgttttgttttgttttgttttgagacagagtttcgctcttattgcccaggctggagtgcaatggcgtaactcggctcactgccacctccctgtctaaggttcaagcgattctgctgcctcagcctcccgagtagctgggattataggcacccaccaccacgcccagctaattttgtatatttagtagagacggggtttctccatgttggtcaggctgttctcgaactcccgacctcaggtgatctgcccgccttggcctcccaaagtgctgggattacaggcgtgagccactgcacccagctgggacaatttgttcaatagtgagcaaagtgtgtctggggaattgtgtgccaggttcagagggagagctgggagcagcagcacacacctgtagtcccagctactcgggaggccaaggcaagaagatcgcttgaggctgagagtttgaatccagcctgggcagcatagggagacctcatctctttttttttttttttttttttttttttttgagacagagtcctgctctgtcccccaagctggagtgcacaatctcagctcactgcaacctccacctctcaggttcaagcgattctcctgcctcagcctcccaagtagctgggattgcaggcatacgctaccatgcctgggcaatttttgtatttttagtagagacggggtttcaccatgttggtcaggctggtctcgaactcctgacctcaaattatccacccacctcagcctcccaaagtgctgggattacaggagtgagccaccgcgcccagccaagaccacatctcttaaaaaacaaaggcctaggccaggtgcagtggtgcatgcctgcaatcccagcactttgggaggcccaggcaggaggatcgcttgagttctggagttccagaccagcctgtgcaacatggcaaaaacccctctctacaaaaaatacaaaaattagctggacgtggtggtgtgtgcctatagtcccagctactcagtaggctgaggcaggaggatcacttgagcctgagagcttgaatctggcctgggcagcagagtgagaccccatctcttaaaaaaagaaaaaaaaggcctggtgcagtggtacaagatcacatctgtaatctcaccactttagaaggccaggagcttgagaccagcttgggcaacatagaaagacctcgtctctacaaaacataaaaagaaattagccaggcgtggtggcgcgtgcctgtagtcccagctacttgggaggctgagatgtgaggatcgtttgagcctaggaagttgaggctgcagtgagccgtgattgggctgctgcactccaacccaggcagtgtagagatcctatctcaaaacaaaacaaaaacaaaaaaggaaagattgcatgtggtcttatagcaaagctgacaagaaaacgttcaggaagagaaggaaaatttcttgtgagctttcaaaatacaccctgaaacctcaaataaattctctgcttggggagagatctagacacctcccactttcctttctttttttttttttttttttttgagatggagtctcacccagtctcactccagtcgtgcccagtctcactccagtctcacccaggctggagtactggagactggagtgtagtggtgcgatctcggctcaccacaacctccacctcactggttcaagcgattctcctgcctcagcctccccagtagctaggactacaggcgcataccgccatgctgggctaatttttgtatttttagtagagacagggtttcactatgttggtcaggcttgtctcgaactcctgaccttgtgatctgcccgccttggcctcccaaagtgctgggattacaggtgtgagccaccgtgcccggctattttttttttttttttgagacaacgtctcgctctgtcacccgggctggattgcagtggcacgatctcggctcactgcaacttccacctccgggttcaagcgattcttgtgtctcagcctcctgagtagctgggattataggtagctgccaccacgtctggctgatttttttatttttagtagagacagggtttcgtcatgctggccaggctggtctcgaactcctgacctcaggtgatctgcccacctcagcctctcaaactgctgggatgacaggcgtgaaccaccatgctggcccttcattcctttttaaggctgaataatattcccttgcacggatgggccatgttttgctggtccattcaccctttaatagacatctgcattgctcccactttttggctattgtgaataatgctgctatgaatattcatgtccagggatttatttgaacacctgtttccactcttctggggatatacctaggagtggaattgctgggccatatttatggcaattctgtgtttaacttttttttttttttgagacaaggtctcactctattgcccaggctgaagtgcagtggctcaatcacagctcaccatggcctcaacctcctgggttcagctgatcctactccctcagcctcccaagtagctgggaatacaggtgcatcacctcgcctggctaatttttttatgcttttcatagagacagggtttcaccatgttgcccatgctggtctcgaactcctaagctcaagcaatcctcctgcctcaacctcctgaagtgctaggattacaggtgtgagccactgcacccagcctgtgtttaactttttgaggacctaccaggcttcaacgacagcatcatttgacattcccaccagcaatggctcagtagttttgaacccttatggctttcaactaactaggacccaagttcaaatcttggcttaaccactgtgaccactggatccttttctttcccatcatgcatcttgcttttcctggtagcaacacccaattctgcctctaggaacccacctgtctcagcatggccagcggggctatcaatcctagaggttcacactcaatgggctgggggcaaatttggggaaccaagaggtgactcccctacctaggaaaattcacaagaacaaggcaggtctaattgagattcacatagggggaggagagagaaggcggccttggcagctgctagggcctcctgagccagcaagattttaaatatgtttttgcacaaaaatagacggatagaccttcaaacaagaagaaaaaagaacctgtgtttagagctgcgagctgagtgtttaggcagctgacagcatttagcctggaacgaactatccaatgcaagtgtgtggttagggtcgtgttcaaaaatacggcttcgaagcagcaaacccggggctgggccactcgccctgtaattctttttccaaataaaaggcagaactattcctggctcggcttggggacttctgcggctgccggggctccaaggaggccagcctggaatgtcaagcatggctctcgccccgccaggctcaggcctatgctgcttgggagcctgtcattgtatgactttttaattaaaacgtgattcccacagggccctgtccgagcccaggactccttcacaggaggcccctgggcttgtggcaaagcgctgggacttgtgatgtttggtagcatgagccaatttggagctatttgtggagtggatttaaaaaaaacaacaacaaaccaaacaaacatcacttgatgtttgccaaatatagcattttgcatttctataagcaaagccctaattttttttttttttttgagacggagtctctctattgtcacccaggctggagtgcaacggcgcaatctcagctcactgcaacctccgcctcccaagttcaagcgattctcctgccccagcctcccaagtagctgggattacaggcgcccaccaccactcctggctaattttttgtatttttagtagagacagggtttcaccatgttggtcgggctggtctcgaactcctgacctcaggtgatccacccgcctcggccttccaaagtgctgagattacaggcactgtgggccaccatgcccagcctgatttttttttttttttaagagacagagggagagctctgttgcttaggctggagtacagtggcacgatcatggctcaccacagcctccaactcctgggcttgagtgatcctcctacctcagcctcctaagtagctgggactacaggcatgcaccaccacatttggctaattttattttttattttttgtcgagatgggggtcttgctgtgtttgcccaggctggtctccaactcctgacctcaaggcatcctcctgcctcagcctcccaaagtgctaggattacaggcgtgagccaccgcacccagcctaaagccttgatttttaaaaagtaatgtacttggccaggcgcggtggctcacgcctgtaatcccagcagtttgtgaggcagaggtgggtggatcacgaggtcaagaagtcaagaccatccttgccaacagggtgaaaccccacctctactaaaaatacaaaaatcagccgggcgtggtggcgctcgcctgtagtcccagctactcaggaggctgaggcaggagaatcgcttgaacctgggaggcagaggttgcagtgagccaagattttgccactgcactccagcctggagacagagtgagactctgtcccaaaaacaaacaaaaaaagtaatgtacttaatcagatatagaaaggaaagaagcactgatccattctacaaggaggatgagctcgaaaacataacgccaaatgagagaagccagacaccaaggccgcgtagtgtgagattccattgatatgaaatgcccagaacaggcaaatccacagagacagaaagaggaagaagaggaagcatggttgccaccggctgtgggggagtggggagtgattgctgatggggacaaggcctgcttttggcagggatgaaagtattttggaattagatagaggtggtggttacacaatattctgagtgtactaaatacctctgaattactcactttatttatttttgtttttatttttattttattttttgggacagagtcttgctcttgtcgcctaggctggagtgcaatgatgcagtctcggctcactgcaacctctgcctcccaggttcaagtgattctcctgcctcagcctcccgagtagctgagattacaggcacccgccaccacacccggctaattttttgtatttttagtagagacagggtttcaccacattggccaggctggtctcgaactcctgacctcaggtgatctgcctgcctcggggcagattctaaagtgctgggattacaggcgtgagccactgtgcacagcctgctgactttaaaatgggtaattttatattgtatgaatttcttaaaaaaaaaaaaagccaggcacggtggctcatgactgtcatcccagcactttgggaggccgaggtgggaggatcacaaggtcaggagtttgagaccagcctggccaacatgatgaaaccccgtctctactaaaaatgcaaaaattagccgggcatcgtggcaggtgcctgtagtcccagctactcgggaggctgaggcagaagaatcgcttgaacctgggaggcagaggttgcagtaagccgagattgtaccactgcactccagcctgggcaacagagcgatactccatctcaaaaaaaaagaaaagaaaacaaaacaaaacaaaaacggcatgtaacttggggagtggtaagaacagaggctctgggtctaaatcctccctggcctgccagtgaccagctggtgggcttaaagcaacaatttagcattctcagatctgaatctgccatctgtaggcagaatggggatactgaggctgggcctcaggaagaccaccgccatctgccacccagctcactatagtcaaatttccccagcttccccagtaacaacctttatggccactttttcctttttcacttaggatccgatccagactcacacattgcccctggggcttctgtttcgttcactacctttcatcaggaaccatgctgcagtctttcccagcctttcacgacatggacattttggtggagttgaagtcagttgttttgtggaacatatcccagggtgctggcctgatggttccctgtgaccaggtagagggtgtgaatttggggcaggatccacagaagcaatagtggatcttccctggtgcgtcgtatcgggaggcacctgacattggcttgtccagttactggggatgttaactgtagtcttatttttttctttttctttttctttctttctttctttctttctttctttttttttttttttttttttttttgagatggagtctcattctgtcacccaggctggagtgcagtggcacaatctgggctcactgcaaactccacctcctgggttcaagtgattctcctgcctcagtctcccgagtagctgggattacagctgcctgccaccacgcctggctaatttttttatttttagtagagacggggtttcaccatgttggccaggctggtcttaagctcctgaccacccacctcagcctcccaaagtgctgggattacaggcaggagccaccatgcccagtctctctctctctctctctctttttttttttagagacagtcttgctgtgtcacccaggatggagtgcagtgacacaaacatagctcaccttagtctccaggtcctgggctcaagtgatccttctgcctcagcctcccaagtagctgaactacaggtgtgcaccaccatgccctgctaatttaaaaaatatgtatttctttgtaaagaaagggggtctcactgtgttgcccagtttggtctcaaactcctagcctcaagaaatcctcctgcctcggcccctcaaagtgctgggattacgggtgtgagccactgcgcccggccaaatgtgctcttatgattcaggcgatgggattatatgtcttaaaatcttcccagagcagggaccccaatgtgcaggaggagctagaaatgactcccttaaatctcttatctgcagagccccgctggccccagcctccattctgtctcagggctccctcactgccatgtcttttccttttttctttcaaaaaaacatctgcaagtaagcccaatgtctgatcgggccaggtgacacggagccagcagggccagggatggcttagacccttttctgagccagaagaggggaccatgtgagggcagatgagatgcattcccagagacttcctggaggagatggcctctgagccacatcctagaaatgagctgcaccttagtgccatttcaagggttctggggctcccggagaagtctccaggggcctttttctgtctcacccagtaggacagcccaggggttcactggtcccctgtcaggggctcatctggactttcgccatcagatgttagtggcagtttccccatgcggtggggaagcacattcatgcccccatcatcagggaacagaccactctgccttctttgaagtttacgatctacaggcaactggatttgaatctctgattttatccctgcctctctggaggctgaaccacaggcctctgtgttcagtccctgcctgggagctattttgggatctcaggtctgtaatttttgctgctcggggaaagccttggcaggaatatggggggcagagaacggagggacagatggctggcttccctcaccaagcctcagtttacccatctgctaacgggggtgagtaattcacacctcacgggagggcggtgaaaaatctgttcaatgctgggtatgaaatgacatcctggagacagcctccatcagggtttctttgtttctctgttttgaaacagggtctcactttgtcacccaggctggagtgcagtggtgctgattcatggctcactgaagcctccatctcccgggctcaagtgatcctcccacctcagcgtcccaagtagctgggaacacaggttcatgctgccacacctggctaatttgttttttatttcatttcatttcattttatttttttgagacagagtctttgctctgtcgcccaggctggagtgcagtggcatgatctctgctcactgcaacctccgcctcccgggctcaagcaattatcctgcctcagcctccctagtggctgggattacaggcgcctgccaccacgcctggctaatttttgtattcttagtagagacggggtttcaccgtgttggccaggctggtctcaaactcttgacctcgtgatctgcccacctcggcctcccaaagtgctgggattacaggcgtgagccatcatgcccagcccacctggctaatttatttttaatattttcatagagacagggtctcaatatgttgcccaggctggtctccaactccttggttaaagcagtcctcccaactcggcctgccaaagtggtgagatggcaggagtgagcttctgcacctgggcacactcagggttttgtctattcttgtgtggagggggatgtctgctcctttttttttttttttatggaggctcgctctgtcgcccaggctggagtgcagtggcacaatcttggctcactgcaagctctgcctcccgggttcatgccactctcctgcctcagcctctcgagtagctgggactacaggcgcccgccactatgcatggctaattttttgtattctttagtagagtcgaggtttcaccatgttagccaggatggtcttgatctcctgacctcgtgatccacccgcctcggcctcccaaagtgctgggattacaggcgtgagccaccgcgcccagcctttattttttactttttttaattactattttttttgagatggagtttcactctatcactcaggctggagtgcaacggcgcaatcttggctcactgcaacctctacctacttcccgggttcaagtgattctcctgcctcagcctcctgagtagctgggactacatgtgcgcaccactatgcccagctaattttgtttgtgtgtgtgtgtgtgtgtgtgtgtgtgtgtttagtagacacggggtttcaccatgttagccaggatggtcttgatctcctgacctcatgattgcctgcctcggcctcccaaagtgctgggattacaggcgtgaaccaccacatccaggtaatttttgtattttcagtagagacagggtttcaccatgttggccaggttggccttgaactcctaacctcaggtgatccgcccaccttggcctcccaaagtactgggattacaggcacccaaagtgctgcacccggcctctgctccctcctctacctcccatcaaaaataggcaagtgagattggtcaactggggggtaattttaactgctgacaccaggcaatgtctggagacatttttggttgttgtagaaaatctggggaggggatgttactggcatctggtgggtggaggccagggatgctgctctgcagcctactgggcgcaggatggccccacaaagagaataatccagccccgaatgtcagtggtgctgaggataggaagttacagcacccaatactgtatttcccatgtatccagatgactcatggttggtgactttgtaatttgatttgatgtgatttgtatatgagtcaatgttacacgctgctactgtttgaatgtttgtccactccaaaagtcaaggagggctgggcacggtgactcatgcctgtaatcccagcactttgggaggccgaggcaggcaaatcatctgagctcaggagtttgagatcagcctgggcaacatggtgagatccccatctctactaaaaaacacaaaaaattagccgggcatggtagcgtgtgcctataatcccagctactcaggaggctgaggcaggagaatcacttgaacccgggaggcagaaattgcagtgagccaggctcatgccacggcactcgagcctggggaacggagagagactctgcctcaaaaaaaaaagaaaaaaaaatgctgggcacgatggctcatgcctgtaatcccagcactttgggaggccaaggtggacagaacaccaggtcaggagatcgagaccagcctggccaatgtggtgaaatcccgtctctactaaaaatacaaaaattagctgggtgtggtggcaggtgcctgtaatcctagctactcagaggatgaggcaggaaaatcgcttgaacccaggagacggaggttgtagtgagccgagatcgcgccactgcactccagcctggcgacagagcgagactccatcagaaagaaagaaagagagaaagaaagagaaagaaagagagaaagaaagaaagagaaagacagagagaaagaaagaaaaagaaagagaaagaaagaaagagaaagaagggaaggaagaaagaaaagagagacttaatcctcaatgtggcagcattgagaagtgagacctttaaaatcatgattagattagattatgattagattatgttatgactggggccaggctcggtggctcatgcctgtaatcccagcactttgggaagccaaagcgagtggatcccttgagcccaggagttcaagaccagcctgggcaacatagtgagactctgtctctgaaaaaaaaaaattaagaaagaaagagttgaaagaagaagaaagatctgagatagcaagttagcatgcccagactcctctccagaaagtccccaccaggaggaagactctcaccagaactgtcccttgaccttggacttccctgcttccagaaattaacaaatacattttgtttctttacaaatcacccatcttcaaggccaggcactgtggctcatgcctgtaatcccagcactttgggaagtggagacggatggatcacttgaggtcaggagatcgaaaccagcctgaccaacgtagtgaaaccctgtctctactaaaaatacaaaattagctggacgtggtggcgcatgcctgtaatcccagctactctggaggctgaggcaagagaatggcttgaaccggggagacggaggttgcagtaagctgagattgcactattgcactccagcctgggcaacaagagcaaaactccgtctcaaaaaataaaattattaatattaattaaattaattaatttattaaatattaagctgcttttataaaaacaaggtgagtactgccctggttctcacaatgtctgggatatttttggttgtcatggatgggtgcagtggggagggaggcatgtatccctactgacatgtggctcagaaatcttgaactaagagaagcatcttccaagggtggcctctctgcagttgtgacatctgagctgggatctgaacgtgccaccccgagtaaagtttgcaggcccagcgtgggggttcagtggacacacacatgtgagtccagaaagacccagtgggtctgaggaacagtgacaataggcccctgggctggggccgagggaaaggagtgacagaaggtgatgtcccagaggccatatcctgaggcctctccctcgatcccgtgatgtttcagaaggtccctctggctgacgggtggagaatgagctgttgggccaggggagaaagtagatggctcgggttgattccccgggcaagatgaaggtggctcggcagagttggagggggctggtgaaacgaggaggaattgcaggctgggcaaagtgttcctgcaaagagcgggctttgcaagccataaggtctgtgttgcaaccactgaactctgcctttgtgtccccaaagcagccttaagatgagatgtgacaaatgggcacaggcatgtgccattaactttatttatggacaccaaaatttgaatttcctagagctttcacatgtcacaaaatatttttcttttaatattctcccaaattttataaaatgtaaaaaggccagcccaggcaacatagggagaccccatctctatgaaaagaaaaagaattaggcagtcatggtggtgcacacctgtggtcccagctactcgggaggctgaggcaggagggtggcttgggcccaggaggttgaggctgtagtgaactatgattgtgccactgcactccagcctagatgacaaagagagacgccatctatttttttaaatggttaaaatggtcaattttctgttatgtgtatacatatatatatgtgtgtgtgtgtttgtgtgtgtatctgtgtatatatgtgtgtgtgtatgtgtgtgtgtatgtgtgtgtgtgtgtgtgtatgtgtgtgtgtgtatatatatacttttttttttgagtctgagtctttgtcacccaggctggagtgcagtggcgcaatctcagctcactgcaactctgcctcccggcttcaagtgatactactgcctcaacctcccgagtagctgggattacagacacctgccaccacacccagctaatttttgtatttttagtagaaacagagtttcatcgtgttgtccaggctggtcttgaactcctggcctcaaatgatccgctcgtctcagcctcccaaagtgctggaattgcaggtgtgagccactgtgccctgtctgttatgtatattttatcacagttttaaaagataaataaaacattccgagcttgaaagccgaaacacaggtggtgggctagatgggaccttggggtcatcatctgctaatcacagagcaacccaaacaggttggcacttggaccaaaagtgtgtgagacccagaccgagggccgggtggaacccagaatcacaggggatttgctaataaggcaaatctgggtgaggacgcacctgctccaggaagggaggtggggttgctctagcgacgatgagcctggggtctaggtggcagcagcaggccaagtgccaggcgccccagggatggggaaggattgattgaataaatgtttaaaggaacgaatgagtggatgcacaggtggatggggaggggttgtgctgtaaccaccatgaaacaaactccacactttgatgagccacgtggagagggagtgggcagaaagaagaaactggaagttgggccgggtgcggtggcttatgcctgtaatcccagcactttgggaggccgaggcaggtggatcacctgaggtcaggagttccagatcagcctggccaacatggtgaaaccctgtctgtactaaaaataggaaaattagttgggcatggtggcacatggtgcagggctgaggcaggaggatcgcttgaaccccagaggtcaaggctgcagtgagccgagatcgtgccattgcactgcagcctaggcaagaagagtgaaactctgtctcaaaaaaaaaaaaaaagaaagaaaagaaaaaagaaattaaaaaaaaaaagaaaatattacctagagtaaaagaaaccagacataaaaggccacatattgtacaatcctatctatgtgagatgcccacagaggcaaatccatagggccagaaaacagattggtgtttgccagggactgggggtggagaaatgggaagtgactggtaatggggacagggtatccctttaaggtgatgaaaatattctggaactaagtagaggtggcggttgcacaacactgcatgtataaaatgccactactttaaaaatggttaatttcatgtgaattgcactttaataaaaataaacaagtatttaaaaatccaccaatgcaaacacttctctgttcctctgtggtggaggaagggacacgcgcttttttttccgaccttaggaaggaacaagggagccggggtcccctcccagcctgggagccctgggcacagtcccggctcatttgtcagagctatcggagccgtcctcgggctggtgggagttcagggctctgaaaggttttctgtcaaggcttgaaagggggccaggtttttttccccccggagccgcgcagtctcggggctgttgttctcagcaatcgcagggcctcgtgttagcaggaagcacagccaagtagggtttcctgcgtgttggagagaggaagctccgtaatgttctgggaggcgatggttaaaaataactccggtatataaagacagcggagggtccccttgttcgctcactcgggcgccggccggctggacgcagggccgagcaggtggtttggggcctcgggaaggccaaacccccgcctctgggcccctggctggggaagacaccagccaagttcagagccccaagtcggcctcacttccacaactcagcgtcagggacaccgtgggcgtttctgtttcaaaacgcttttctccagcaaagaacgtaacctcaagctgctgtcagggtagaggaatccctgccccccgccgccacccagataggttgggccgtgattttggctgtgcctggcagtgacgatgtagcgcacccaggctggggggcgctggcagccagggttcaaatcccggctctgccacctaacgctgggactcagtttctccatctgtagaatggaactaacaatagctcctatgctgttgtaagcactaaacacagaagttaagctttgggagttaggagggtgtgacctgggaaatggatgtctgccctttcataagcagattttgttttgttttgttttgttttgttttgagacagggtctcactctgtcacccaggctggagtgcagtggcaagatcacggctctctgcagcctcaacctcccaggctcaagtgatcctccctcctcagcctcccaagtatctgggaccacagatgcacgccaccacgcctggctagttttcttttgaatttcagttaagacaaggtatcactatattgccctggctggtctcgaactcctgggctcaagagatccccccatctcggcctcccaaagtcctgggattacagacatgagccactgcgcctggccacaagcagatttttagagttgtcattgccatcggaacagctgcccagacagcaagaagagcaaaagcctgtgtctggggtcaatgccagggtttgaggcttccaagcctaggtgaccccacaacagattcaacacatacaaaaaggatcacaaggacatgttataaacatctcgatgccaaaatattcagtgacagggatgaaatggacacattccttgaaagacacaaattaccaaagcttacttaagaacaaatagatcggccgggcgcgatggctcgtgctgtaatcccagcactttgggaggccgaggcaggcggatcacctgaggtcaggagtttgagaccaggctggccaacatggtgaaaccccgtctttactaaacaacaaaaattagctggccatggtggcggccactgtaatcccagctactcaggaggctgcggcaggagaattgcttgaaccccggaggtggaggttgcagtgagctgagatcgtgccattgtactccagcctggacaacagagtgagactctgtctcaaaaaaacagaaaagaaagaagaagaaagagaaggggaaggggaagaagaggaggaataagaggaagaagaaagagaaggggaaggggaggaagaggaggaataagaggaagaagaaagtagaaagaagaagaggaggaggaagaaggaggaggaggaggaggaagaaggaggagaaggaggaggaggagaaatagatcacccgaatatccctgtgtctatgggataaatcaacattgttgtaaaaagaacttcctacaggccaggcattgtggtgggtgcctgtaatcccagcactttgagagcccaaggcaggaggatcacatgaggccaggagttcaagactagcctaggcaacatagcaagatcccatctctacaaaaaatataaaaattagctgggcttggtggcttgtgcctataatctcagcactttgggagactgaggtaggagactcacttaacctcgggagtttgagaccagcctgggcaacacagtgagaccccatctctacaaaaacattttaaaattagccagacatggtgggtttcaatggtggctttcacttcatagggggcttttgttccaaagtcgcaggaggtggaattccatcaaccagtcccagctacttgggaggctgaggtgggaggattacttgagcctaggaggtcaaggctgcagtgagctatgattgtgccactgcactccagcctgggcgacagagtgaaaccctgtctctaaacaaacaaaagcctttctacaaagaaaactccaggtctggatggcgtccctggtaaatttcccctaaacatctaaggaagagagagcatcactttgataggttggtgcaaacgtaattgcggtttttgccatgacttttaagcaattacgtttgcaccaaccttacacaagggctttcaccaaactgaacaggaaagaaagcttcccgactggctttataccaggggctgctccaggcatgctggggactgtcctaggtgccgatggctggcttcctgctgttcacaggggcgctggggctccctgccccccaaaacaagatcctgttcccttccagggaggcgtgttcttctgccgttagggcagagccccggtggggctcagggaaatgaaagacatatttgctctccagaaatctgagcccgcagtgccagctcccctgaagggcgcctttgtacgctgcttgttgccacaattagcgccgtcccagactgcggcctgcagatcgaggccgccttggctccgaagcccctttcaggagtcatcagcgtcctccatgggctctgacgtgggctatttttaactggccaaaggggagttgttatgggccagcagcagcgggggacttgaggggagagaggatggcgggtgttggagaggccaagggctgtggccggtggttagggtctctgcggggagcagtgtctgcagccctgggccatggggtgtggaggcagggacctcgggcctcggtttcctcatctgtccaatggtggctttcacttcatagggggcttttgttccaaagtcgcaggagctggaattccatcaaccagtcccagggtcctgccctgcctgcctctctccatcctgttctctgtccctccctctctctgtgtgtctctctgtgtgggggggtctcactctctctctctgggtctctctctctctctctgagtctctctctccctctctctctgtctctctgggtctgtgactcttttctgtctctctgtctctctatgtgtttctctctctgtctctgactttcttcttctctgtctctctgggtctgtgactcttttctgtctctctgtctctctctgtgtgtgtttctctctctgtctctgactttcttcttctctgtctctctgtgtgtctctgtatctgtctctctcatgtgagtctctccggcatgagtctctcccccttctctctctgtgtctgactctcttccctcgtctctctgtctctacccctctttctccatctcttgctctttctctctgtgtctccgtttctctctatatatctctctccctctctttccttgtctctgtctctccctctctgtctctctttatctcctctatctctgactctctctctgaccctccacgtctctcccagggtatacattgtgtttccgcagctgtgcctgggcagggcgagcaccccataccccaagaacaagaagggtggccctacggcctccattcctttcatggggaaaagactgcggactgagtggctgcccgtcccacagtcgaccctccaactccaaggcacgctgtgtgttcagagccgcccctcggtctccatgtcccagcagggagaccctgacttctggtctcattcaaagcttttagaagaaggctgtgcactctttgcaactagattttcttaattaaataaatagatgtccggacctctctgggaagggacttggagctcctgccaagctgtcctgggtgaccatgaactcccagggggttggtctcaataaagagcagcccacggccaatagcacacctgctgatgctctggggacatccctgtgctaagggaaggcactgcccctaccccaccttacggaggaacgcaggcttagagaggggcagtcttgcaaccaggccaacaggggaggctgcctgaacctggcctttttttttttttttttttggagacagagcctcactctgtcacccaggctggagtccagtggtgcaatctcggctcactgcaacctctccctcccaggttcaagcaattctgctgcctcagcctcccgaggagctgggactacaggcacatgccaccatgcccagctaatttttatatttttagtagagacgagatttcaccatgttggccaagctagtctcaaactcctgacctcaagtgatccacctgccttggcctcccaaagtgctgggattacaggtgtgagccaccatgcctgaccttttttaaattgtggtaaaatacatgtaacataaagtttatccatcgtaaggtgtgcaatatggtggcattcagcacgttcacaaggttgttcaaccaccactagtatctacttcagaacattccatcagtccaaaaagaaaccctgtcccagcggggcacggtggctcacgcctgtaatcctagcactttgagaggccgaggcgggtggatcacgaggtcaggagtttgagaccagcctgaccaacatggtgaaaccctgtctctcctaaaaatacaaaaaaattagccgggtttggtgacaggtgcctgtaatcccagctgctcaggaagctgaggcaggagaatctcttgaactcaggagacgaaggctgcagtgagccgagatcgcgccactgcattccagcctgggcaacagagggagactctgtctcaaaaaaaagaaaaaagaaaagccctgtccccgtcagcagtcactccccatttcccttcccccaccccaggcagccactaatctgcttcctgtctctacggatttgcctgttcagggcatttcatatcaatgaaatcatacaccatgtggccttttgtgtctggcttctctcactcagcatatttttggagttcatccacgttgtagcatggagcagtgcttcattccttttcacagctgcgtaatattccattgctggatggaccacgttttgtttatctgttcattcgttgacagacacccaagttgcttccaccttttggccgttgtgaacagtgctgctgtgaacatgcatgcacacatctttgtgtgaacacccaccttcaattcttttggggatattccccaagaatacaccaacgaataccaaaatccttttgagtatatgagttaccacttcagggtggagctgctatggtatatggtaatttttttattttatttatttatttttgagatggagtcttactctgttgcccaggctggagtgcagtagtgcaatcttggctcactgcaacctctgcctcccgggttcaagcaattctcctgcctcagcctcccgagtagctgggacttacaggtgcacactatcacatccagctagttttcttgtatttttaggagagatggaatttcattgtgttgtccaggctggtcttgaactctttacctcaagcgatccgactgcctcagcctcccaaagtgctgagattacaggcgcgagccaccgcacccggccatgatatgttataaggtaattctatgttgcacttttttcttttttattgagacagggtcttgctctgtcacccatgctggagcgcagtggtgcaatcatggctcactgcagcttcaacctcctgggttcaagccatcttcccgcctcagcctcccaagtagctgggacaacaggtgcatgccaccactcctggctaatttttttattctatgtttcactttttgaggaaccctcctgattttggccctggcagaattaaggctgaattatccacactccctcggacgcacctgctgtccacagctcccccaactccctgatggcggcccccaggaacaatcctcaaactgcaccagctctttcagctctcaccttccttatctgtacatcagccgtggtgacaatgtaaggagatgatgtcagaaaaggccccagctgtggcctggcagctcaaatgaaaatcattgttcccctaccccacccccaacccaggtagggttgacagattaaacacaggacgccctactcaaatgcgaacatcagataaacaatgaattcttttttttagtataagtatatcccattccatgcactattcgagatatacttctactaaaaaaaaaacttgttgtttatctgaaattccaatttaatggagtgtcctgcgttttacttgcaaaacctggtaagcagcctttgtaacagttggttctcacagacaggcagaaattgaaggggatgctaggttttctgtttgtttgtttgtttcttttgacacagagtcttgctctgtcgcccaggctggagtgcagtggtgcgatcttggctcactgcaacctccgcctcctgggttcaagcgattctcctgcctcagcctcccaagtagctggaactccaggcatgtgtcaccatgcctggctaattttttgtatttttagtagagacggggtttcaccatgttagccaggaaggtcttgatctcctgacctcgtgatccccccacctcagcctcctaaaatgctggcattacaggtgtgagccaccacgcccggctgatgctaggtatttcagaccccaagtcacccatccacccatccagcctgtcacccaggctggagtgcaatggtggtgatctggactcactgcagcctcgacctcctgggttcaagccatcctcccacctcagcctcccaggtagctggaaccacaggtgcatgctcttatgcctggctaatttttgtatttttttgtagagatgagctcttgctatgttgcccacctgctgggactcaatccaccaagtagatgtctccaattctccaccattccccaagacaagtctggtgacaaagaattggttcagaacctgggaagtctttgaaggtccacttttgtcagatgacacatgatctaaattggtccccaaccccaggccgccggaaaggctagtgagcatggggtgagcatagaatcaccgctctatgaaaacatgcctccctcagccctgcctcctgggccaccgaggtctgattcacgcttcctcgtattcaaacagagtcggtgcagctggaagcaaccctgccaggggtaagtcagccagtgcaggtaacatttctccccctcgatttttcccagaacccggctccgggcccaacacaggatgcctgggggatgtcagaggattctaagtgaggaaacccctgccgtccattgctgttctgttcccccagggacgctttgtccagggcccaccgatccatcacacatacaaggcccagggccctggaatgtttaagagcccacaaaaaaatagcctttttttttttttttgagacagagtctcactctgtcgcccaggctggagggtagtggtgcaatcttggctcactgcaacctccacctcccgggttcaggcgattctcctacctcagcctcccaagtagctgtgattacaggcacgtgccaccacacccagctaatttttatatttttagtaaagatagggtttcaccatgttggccaggctggtctcgaacatctgagctcaggtgatctgcccgccttggcctcccaaagtgctgggattacaggcataagccaccacgtccggccacactgtatgtttttgaatgttaggagggacagaggatcccatatccagcatgtaccgggagatacaacccatttctcagatgacaaaactgaggctgagaaaagagaaacaacttgaccgagctctaggctattgttctctaaaaaacttttgtggggacagtgatttttttttttaagagacagggtctcattctgttgcccaggctggagtacaatgatgcaattgtagctcactgcagcctcgaacttctgggctcacgtgatcttccgccttcagcctcctgagtagctgggattacaggtgcatgccaccatacttagccacttagctttttttttttaattttatttttattttttatttttgtagagatgggatcctgctatgttgcccaggctgaccttgaactcctggtctcaagtaatcctctcatctcagcctcccaaagtgctgggagtgcagacatgagcccccgttcccagcttgattttgtatctttttgatgctctgggctctgtggggtgtaagctatagatacttttctttgtagataaagtgcctgcaacttacatttagtttcagggggtccatgaacccctctgaagctcacacaggggaacaatcctgggtccagatcaaagcctgtgaaatcagtttaaatcgtggctcagccaaggatcaaccgtgcctcagttttcctcctccagcacatcactatagagtggtggaaatattactggctctccgagtcccaaaaactaaggaggatccatgcagggcctggcatatactgggttttcaataaacagttttcttctcccctgtcagcctgatgctccacaaactctcaaacacacacacacacacacacacacacgtgtgagcatgagcctgaaaaaacacagctggccatttcattgatagattgacttttgttattattatctttagtagagacaaattctcactatgttgcccaggctggtcttgaacccctgggctcaagcaatcctcctgcctcggcctcccaaagtgctgggattacaggtgtgagccaccgcgcctggccaagctggccattttatttatttatttatttatttgttgttattattattattattattattattattattattatttgagacagagtgttgctctgttgcccaggctggagtacagtggcgcaatcttggctcactgtaacctctgcctcccgggttcaagcaattctcctgcctcagcctcccgagtagctggggttataggcacccgccaccacgtccagctaatttttgtatttttagtagagacagaattttaccatgtttgtcaagctggtctcaaactcttgagctcaagcgatcctcctgcttcggcctcccaaagtgctgggatgatgggcatgagtcaccgcgcctagccaagctggccattttggactcaagaccttcacatttattcctgaggaaagggaaaaaaaaaaaaaaaagaaggaaaactccctctcactacacatagtttcaaaaactgccctttcagtggaaaagttttttacgtcttaagaaaaacctgattgtttaaagtcaggtctgcagtaaacgggcggctatttttaagtgcttggggacatatgtctgcaacccatggaaagaagagaagccgtttgtcttgggagcttgtccagaatgactggagtgacgtggagtgcggggttggaggtgggagtgggggggacacgagctgtcagcctgccagaagcacaaaaaaactcccaaaatattccagaacattccttctcgagtcgtcagaaatcatactatccgggccgcgcctcaaagttcccactcagcaagcagttgttttccgtttcattttccctcttcttttttttttcccctcaaatcacatttgtttttccacaatcgaaggcgctcacacacatctcgccctgaaattcagacacactgttctcacctagaattgtaaacagcaacctctccaccccctcccgtggccgggtgtttgggtgatgctggaaaaatcttctaaaggcagggagaaaaaaagggagttttccaaaaatcgacacagggcttacgttacacagagtttatgcaatcagcccctggaaacaactagacgggcctccccagctgcagaggctctgagtagcaataaagtcgtgagaagggaaagtcagcctttggcaagaatccccgactcccccatgaaagtgataagggcggtgtggaccgcagctgggaggccaactgcgtatttgaaatatgttggcaaggccaggttctcgtaaagcatcacagaggtcctgtggaatagattcctccagcctgagaccctggcgcacccttgggtcactggtggtgtgccaggattttatttacttatttgcttgctcgtgtgttaatttttttagagacaaggtcttgctgtgtcacccaggctggagtgcagtggtgcaatcataactcactgcagcttcaaccccccaggctcaagggatcctcccaccctcagcctcctaagtaggcacatgccacccggctcagctaagttttgttgtttttgtttttgttttaagtttttgtagagatggggggaggggttttgctatgttgcccaggctggtctagaacgcctggccttacgtgatcctcccacctcggccttccgaagtactgagatgacaggtgtgagccaccacaccaagcctcaacaggagggtgtagacactttctagcagcatctcctccaccctcctagggcccttgggggctctatttggttcctaatgtcttctcccattttgcagaaaacaaaacccaaagtgcagagagaggaggtggaatgtgattcagggataaaccacacagagaaagcctaaagtgaaatctgtctgctgccacgggatttcccttaaagatccctgtccctcggccgggcgcagtggttcatgcctgtaatcccagcactttgggaggccgaggcgggcggattactggaagtcaaaagttcgagaccagcctggccaacatggcgaaaccccgtctctactaaaaatacaagaattagccgggcatggtggcgagtgcctgtaatcccagctactcaggaggctgaggccgaagaatcgcttgaacccgggaggcagacgttgcaatgagccaagatcgcaccactgcactccagcctgggcaaagagggaaactctgtctcaaaaaaaaaaaaaaaaggaaaaagaaaaagaacaagaacaagcaccgactacatgcagaacatgaaggaactgagtggacgtgatgctgaacaatgaaaacgggccagccatggtggctcacacctataatcccagcattttgggaggctgaggcaggaggatctcctgggcccaggagttcaagactagcctaggcaacacagtgagacctcgtctctacaaaaaatttaaaagtagggcaggaggatcacttgagcccgggaggtcgaggctgcaatgagctgtgattgcaccaactgcactcctgcttgggcgagaggagtgagaccccaactcgaaaaaaaaaaaaaaaaaagaggagggggagggggagggggaggaggaggagcatcactgtgattccactttagggaaattaggcaaaactcctctccagcgacagagcttggagttgcgcggagagggaggctttgcaggcactagacattcctgtgtctggatccagggaactgatcctgccagcagaatccagcgtgtacactcgagatgatcgcgctgtgcggcatgcagttctgtcttcattggaaaagatcaaggctgggtgtggtggctcacgcctgtaatcccaccactttgggaggccaaggccagtggatcacttgaacccaggagttagagaccagcctggacaacatagtgaaaccccgtctctaccaaaaatacaaaaaattagccgggcgtggtggcgaatgcctgtagtccaagctacttgagggggtgaggtgggagacttctttttttttttgagacggagtcttgctctgttgcccaggctggagtgcaatggcgcaatctcggctcactgcaacctcctcctcctgggttcaagtgattctcctacctaagccttccgtgtagctgggactacaggtgcccaccaccacgcctggctaattttttgtatttttagtagagacagggtttcactgtgttggccaggatggtcttgatctcctgacctcgtgatccgcctgcctcagcctcccaaaatgctgggattacaggtgtgaaccatcgcgcctggccgagaatttcttgaacctgggaggtggaggttgcagtgagctgagatcacgccactgcactccagcgtgggcgacagagtgagactctgtcttaaatttaaaaaagaaaagatcaaacaggcatttattgagcacctgttgcatgccagaccctaaaaaggcaacgaggacagagacccccgccactctggaccaggaggccaagtggaggagacgcaaaccaagtaagatgctgctgcagaaacttccagccacggtcgatccatgcaggtggttggaatcccagaagccccatgccccagagaacccctgctgtgtctggaaagaaaaaccaatcagttctgactctggctgtgcagcagggtaagcagagggagtccacagacgagggataaggctctgtcctggtctcaaagatcaaggaggagtggatggtggtagaaagaggtcccagcgcgtgatttgattggaccagtgttcacagggccacttcccagtccaggatgagcaggtgtgaaaatgcagcctccagcctgtgcagtggctcatgcctgtaatcccaacactttgggaggctgaggctggctgatcacctgaggtcaggagttcgagaccagcctgaccaacatggagaaacgccatctctactaaaattacaaaattagccgggcgtggtggcacatgcctgtaatcccagctccttgggaggctgaagcaggagaatcgcttgaacccgggaggcagaggttgcggtgagccgagatggcaccattgcacaccagcctgggcaataagagcgaaacttcttctcaaaaaaaaagaaaaagaatagaaaatgcagcctccgtgacttgcccgaggtccccaagctgggacaaaatgggatacatctcagcagccaggtttgtccccaaagggggctgtaaaacctcgtgggaacccacagggacccgccccttgaaggtggtgatggtccccactgcctgctggcttcgctggtgactcagtacccaccaggccaaggtgtgtctgggagctgcctctctggacggccaccccaccttttgtacatggcctcttggtgcctgggacacagtgagtcacaagacaaagccgtcagattgtctggggcaaaaccctttgtggcaacagatggacaagcctggtaaatggcccgggcagctgggcagccagcgctttgtaaaacctttccaagtggtcctctttgaacctgatgaggacaaaagccaatggccaatcatctctgaaagtcctcaaaagtgcacagacatacccttctttgtgcatggggacagaagactttcaacgtgaatgcgattccttcattctgtcccggtgagcctcacttatttggggcatcaagtatcccagcctggaagacaaattgtttcaccttcaccatgaatggtgtgtgtgtgtgtgtgtgtgtgtgtgtgtgtgtgtgtgtgtgtgtgtgtgtgtgtttgagatggagtctcattctgtcacccaggctggagtgcagtggtgcgatctcagttctctgcaacctctgcctccccagttcaggcgattcttgttccttagactcccaagtagctgggactacaggtgcccaccaccacggccgactaatttttgtatttttagtagatacagggtttcactatgttggctgggctggtctcgaactcctgaccttgtgatccacccgccccagcctcccaaagtgctgggattacaggtgtgagccaccacgcccagcccattgtctctatttggaaggaatgagcagcatgttgcccctgacgaggagaaagggagagacaggcccacagcctcctcacccccacccagttccacccaccggtcacctgagcaatcctctcatcttggcccaaaaccaaccaggggcagggaatgaggctgcgttcagtgcaggcagaactctaagaggctcccaagattccaggcagtctgcgtacacacctgctataatcccgtaagtctgggtgtgactagtgagtcagtgagggtgtcacttccttgataaggtgacattttaaggcaaaggtgagaaaaccttaccaatataattaaggtccaaaataatttgattttgagttcatcaaatgggagcttaccttgggtgggcctgacctaatcaggagagtgctttgaaagaggatctaatggtaatttttttttcaaccatcaattttgctcctgagtctaatggcaaattttatgttatgtatatttaaccacaatttaatttttttttgagacggagtttcattcgtgttgcccagactagagtgcaatggcgtgtgcagtcttggctcactgcaacctccatctcccaggttcaagcaattcacctgcctcagcctcccaagtagctgggattacaggcatgcaccaccatgcccagctaattttgtatttttagtagagacggggtttctccatgttgggcaggctggtctcaaactcccgatctcaggtgatctgcccaccttggccttccaaagttctgggattacaggtgtgagccaccatgcccagtccttaaaatttttaatttaaaaaaaaaaaccgtgatggcaagtgaaaacaaccaaagcgtccaccaacagatgaatggatacacaaaatatagtgtagccatagagtggaatattattcagccaggaaaaaggaataaaattctgattcatgctacactgtggttgaagcttgaggacattatgctaagtgaaatgagcccatcacaaaaagacaactactgtctgatttcacttataggaggtctctagagtggtcacacttatagagacaggaagtagaatggtgggtacgaggggctagaggagaaggaatggggagtttgggtctaatagggacagagtttcagtttgggatgataaagaagttctggaaatagaaagtgacaatggtggccaggcacggtggctcatgcctggaatctcagcgctttgggaggctgagaggggcagatcgcttgagcccacgagttcaagaccagcctgggcagcatggtgaaaccccatctctacaagaaatttaaaaattaggcaggtggtggtacatgcttgtagtccctgctactcaagaggctgaggtgggaggatcactggagcctgggagggtcgaggctgcagtgagccaagattgcaccactgcactccagcctgggtgacagagtgagatcctgtctcaaaaaataaaaagtggcaatcgttacacaacatcatgaataaacttaatgccactgaattgtacacttaaaaagagttaagatgaggccaggtgctcacgcctgtaatcccaacactttgggaggccaagtaggggtgtggattgcttgaggccaggagtttgagaccagcctgggcaacatggcaaaaccccgtctctacaaaaaaatacaaaaattagccaggcatggtggtgcacacctgtaatcccagctactcgggaggctgagggatgagaatcacttgaacccaagaggtggaggttacagtgagccgagatcactccattgcactccagcctgggcgacagagtgagactctgactcaaaaaaaaaaaaaaatggttaagatgaattttaataaatgttatgtatgttattttaccattcagggggttgtctttgttttgttttagagacagggtctcactatgttgcctgggctggagcacagtggcactgtaccgtacaggacaccctgtgatatggttcgtagtctccagggggggagagaagaatgacattactcccaatatcgtggggagtgtccacccccctgtgatattgttcataatatccagtcccccctcaatattacacacggtatcacggggaagtgtacacaccctacacaccccctgcgatattgagggtactatcatcttgtcacttcctgggctcagtggctcacacctgtaatcccagtattttgagaggtggaggcaagggaatcacttgaagtccaggagttcaggaccaaccagggcaacatggagtgccctctgccctccccaccaaaaaataaaaataaattagctaggtgtggttgctaattattaatattatgtgtgatatcacaggggggtgtacacactccctgtaacattgggggtaccatcattctgtcccccctttgatatgacgcacaatatcacttgagggtgtacacaccccctacaatattgggaatactatcatcctgtcctcccctggatattatgaccagtatcacagaggggtgtacatgccccctgcgatattgggggtactatcatcctgtccccccctgtatattatgactggtattatggggggtgtacacgccccctgcgatattgggggtactatcatcctgtcccccccgtatgactggtattacaggggggtgtacacgccccctgcgatattggaagtactatcatcctgtccccccatctatattatgactggtattacaggggggtgtacacgccccccgcgatattggggatactatcatcctgtcccccctgtatattatgactggtattacaggggggtgtacacgccctctgcgatattgggggtaccatcatcctgtcacgccctgtatattatgactgctattacagggggtgtacacgccccctgcgatattgggggtactatcatcctgtcatgccctgtatattatgactggtattacagggggtgtacacgccccctgcgatattggggatactatcatcctgtcccaccctgtatattattacaggggcgtgtacacaccccagtgacattggaggtgtgatcatcctgtccccctttgtatattacacgtgccatcacagggggtgtacacagtggcatcacagctcactgcagcctggatctcccgcctcagccccccaagtagctgggactacaggcgtgagcaaccacacctagctaatttatttttattttttggtggggtgggcagagggcactctatgttgcccaggctggtcccaaactcctggtcttcaagtgattcccctgcctccctctcccaaaatactgggataacaggcgcgagccactgagcccagctcaccttaatttttttgttgttgtttaaaacaaaaatcaatgcatacaggctgggtactagttatttggacaactagtctcaaactcctgggctttagcctgtaatcccaaaaccccatctctacaaaaaataccaataaaattggccaggtgtggtggtgcacaaatgtattcccaactactcgggaggctgaggtgggaggatcgcttgagcctaggaggccgacgttgcattgaaccagatcacgccattgcccttcagcctgggcaacagagagagaggagactccgtcttaaaaaaaaaaaacaacaacaacaacaaaaaaaacggctgagcacggccgctcacgcctgtaatcccagcactttgcgaggctgaggcgagcggatcgcctgaggtcaggagttagaaatcagcctggccaacatagtgaaaccctgtctccactaaaaatacaaaaaaattagctggatgtggtggcaggcactcccagctactcgggaggctgaggcaggagaatcgcttgaacccaggaggcggaggttgcagtgagccgagatcgcaccactgcactccagcctgggcaacaagaatgaaactccatctcaaaaaataaaaaaataaagccaggctcagtggctcacaacacctctaagcccagcactttgggaggccgaggcgggtggatcacctgaagtcaggagttcgagaccaacctggccaacatggtgaaactccatctctactaaaaatataaaaattagccaggcatggtggcctatgctgtaatcccagctactcaggaggctgagacaagagaatcccttgaacccgggaggcagaggttgcagtaagccgagatggtgccactatactccagcctgggcgacagaccaagaagactctgcctcaaaaaaaaaaaaaaaaaaaaaaacaacaacaatgggaagcctctgaaactccccttccccaggggtctccgggggtctccacactcctcggctgagtcagccttcctcctgcaaacagcccagggttcaccaagtgtacaaggctgtcgtgggccccatgccccttctcgccacaggcttgtgcaggcacggggccgtccccgcttgattgctaggggtttagccaatattttcttacggggcgcccttgctgggacacaggtgcaagtgtgacatcgtgggctgtgagtcaggccttggcactccttgcacggccggccggcatgagtcaggctgcatttgcccactgttcctgtcttttctcttgttctgaacaccgcatgtgccaggccttctgtgggtcatcagtcattattttgggtatgcagcgcagatcactcagggacagacttctctgggtcaggggagctgggactttacttatcaaattgcaaatgtccaacataccccatgcagaaccagtgacacggagagaggtttccatcccagggctggggtcggggagggtgtcgaacacccagtacagcccccagggtttcctagaaatgcaaatcacagctctgaagtgcagcctggcctcttatggttagacacaggttcacacctgagaaagcttggcaacgtctagagacatttttggtcctcacgactcggggaggcgcgtcgggggaatgctattaattgtgggttttgccattaaaaaaaaagtaatggcaagggccaggcgcggtagctcacgcctgtaacccagcactttgggaggccgaggcgggtggatcacctgaggtcaggagttctagaccagcctggccagtatggtgaaaccctgtccctactaaaaatacaaaaatcatggccgggcgcggtggctcacgcctgtaatcccagcactttgggaagctgaggcaggtcgatcacgaggtcaggagatcgagaccatcctggcgaacactgtgaaaccccgtctctactaaaaatacaaaaaaaattagccaggtgtggtggcgggcgcctatagtcccagctactccggaggctgaggcaggagaatggcatgaacccagggggcggagcttgcagtgagcggagatcacgccactgcactccagcctgggcaacagagcgagacaccatctcaaaaaaaaaaaaaaaaagtacgaaaatcagccaagcatgatgccgcgcacctgtcatcccagccactggggaggctgaggcaggagaatcgcttgaacccaggaggcggaggttgcagtgagccgagactgcagcactgcactccagcctgggcgacggcataagattccatctcaaaaaataataataataataatggcaagaacggcaatgacttttgcaccaacctaatagtatctggtgggtgcaggccagggatgctacaatgcacgggatggcctctgccacacagataatccggcctcaagtgctgaagttgggaaatcctgcttaccagcccctgaagagtccatttctcatctcatgccggcttaccccctaccaccttttttttttttttttttgagacagtctggctctgtcccccaggctggagtgcagtggcacagtcttggctcactgcaacctccgcctccctggttcaagtgattctcctgcctcagcctcctgagtagctgggattacaggcgcgcaccaccacgcccagctaatttttgtatttttagtagagacggggtttcgccatgttggccaggctggtctcgaactcctgacctcaggtgatctgcctgcctagagctcccaaagtgctggtattacaggtgtgagccaccgcgcctggcctaaataattttaaaataggtcagttgacagtcttcaggcggcaagttagagaaacacatgcaggcagatgcatgcttgtttgaggctgtaaagtgtccacattgggaaactggggagaagataggagaactatgtaggggctctaggttctgcagctggcaatattcttctatgtccacttcctcccattaaaattcggcctccagccaagtggccagtgtctgggatatgttattgtgtctggctctgaggaactggaactccttccagttcttgaagatacttggggagggaagatgcttggggagcatttgtttggctccccagccataatgcacagtattggcatgactgggggtatggatggggacactgggcatccccgatatgatgtgatgaggagggcatgctcccgtcttcttccccaaaccccacaattcctgtctaaccacaagaaaatgtcaaacacagattggggtacacttggatgccctggggggggaccggccagcactctttaagactgccaaagtcagccaggcacggtggctcatgcctataatcccagaattttgggaggctaaggcaggttgatcacctgagggcaggagttcaagaccagcctgaccaacagatgaatccccctccctactaaaacacacaaaaaagtaggtgggtatggtgggtgggcgcctgtaatcccagctactcgggaggctgaggcatgagaatcacttgagcccaagaggcagaggcagaggttgcagtgagctgagatggtgccactgcattccagcctgggcaagaagagcgaaactccatctcagaaaaaaaaaaaaaaaaagactgacaaagtctctcacacctgtaatcccagcacttcaggaggccaaggcaggaggatcacttgagtccaggaattcaagaccagcctggacaacatagcaagaccccatctgcacaaaaagtttaaaaaaatacccaagcatatggcacacacctatggtccctgctactcaggaggctgaggtggaaaaatcacttgagcccaggagcttgaggctgcagtgagctgcgatcaagttactgcacttcagcctgagcaacagagtgagagcctgtctaaaaaaaaaaaaaaaaaaaaaaaaaaaaaaaaacgggccaagcacaatggctcaggtctgtaatcccagtacttttcaaggctgaggcgggcagatcactggaggtcaggaatttgagaccagcctggccaacacggtgaaaccccatctctactaaaaatacaaaaattagccgagtgtggttgtggatgcctgtaatcccagctactcgggaggctgaggtgggagaatcggttgaacccaggaggcggaggttgcagtgagctgagattgcgccactgcactgcagcctgggcaacaagagtgaaactccgtctaaaaaaaaaaaaaaagaaaaaaaaaaacaacaagagattgaacactgctgaggtcatgaaaaacaaggaaagactaagaaaccatcacagaccagaggagatcagggaggaacgggggctaaataaggtgaaggatcctggaagagagggaggacatttgtgggaacattggtgacatccacatagaatgtctggagtttagttgatagcatcattgtcccagcattaatttcttagtttcaccaaatgtactgaggtagggaaagatgtcaacatcagaggaagctggtggaaggggacatgggagtgctgcatagcctctttgcaactttcctgccattaaactgattccaaaataaaacacttataagacgtttattttacaactcatgccaggtgcagtggctcacacctgtaatcccaatgctttgggaggccaaggcaagaggactccttgagttcaggagtttgagtccagcctgggccacacagcaaaatcacatctctacaaaaattacaaaaattagccgggagtgatggcatgtacccgtagtcccagctacttgaggggtcgcgatgggaggatcgtttgagcccggaaggtcaaggttacagcctgggcaacagagtgagaccctgtctcaaaaaaaaaaaataaaaaaaagtaagctaagaagggagacataagcagcaatattggaacttacccatacttaaataaaaaaatccttccctatctgaaatgtatttatttatgattattttttagacagggcctcactctgttgcctaggctggagtgcagtggtgtgaccatggctcattgcagccttgacctcctgggctcaagcaatccggctgagtagctgggaccacaggcacgagccaccatgcccggataattttttttttctttttttgagatggagttttgcttttgttgcccaggctgcagtgcaatggcacgatcttggctcaccgcaacctccacctcccgggttcaaacgattgtcctgcctcagtctccctagtagctgggattacaggcagatgccacgacgcccagctaatttttatatttttagtagagatagggtttcaccatgttggtcaggctggtttcgaactcctgacctcaggcaatccacctgcctcggcctcccaaagtgctgggattacagtcatgagccaccatgcccggcctcccggataatttttaaaaaattttttgtggctaggcgcagggctcacgcctgtagttttaacactttaggaggccgaggtagatggatcacctgaggtcaggagttcgagaacagcccggccagcatggtgaaaccccgccccgcctctactaaaaatacaaaaattagcaaggcgtggtggtgggcgcctatactcccagctactcgggaggctgaggcagcagaatcgcttgaacccgggaggtggaggttgcagtgagtcgagattgcaccacttcactccaacctcggcgacagagactgtatcaaaaaaaaaaaaattttgttgagataaggtcttgctgtgcttcccagaccggtctcaaactcctgggctcaagcgatccactcgccttggcctcccagagtgctgggattccaggcacgagccactgcacctggcctctatctgaaatttacatttaagtggggggtcctgtgtttcagcccaaaactctagtctaggcggtagaaaggacccagtgggctgggggtggggcccagagtcagcacccggctctggatctggcacctgggtggcaggggttccattaactgaggtgggaaacagaggccggagtggaggggggataatgagctcattttacagcagctgctaatggctcttaataatgatggtgatgacgataattgcacctcccccacagcataaatcttgctccacccgggctggttttggactcctctggctccttacccggcctgggaacctgaggggcatcgagccagactcacgcccgcgtcccccgccacgcctagccctggtgtggaactgcacagatgcccccactgtcccctcccgccgtcccgagttccctggggttgctattaagaaacctgtgacctggaagctccctcctggcttcaagtcttcctgcctttgcttcgagtcgtcctgcctttcaacactgaaccaatgtagttcttacatatattgactgatgtctcctgtctccctaaatgtccaagactaagctgtgccccgaccaccttggacacatgtcatcaggacctcctgagtctgtgtcatggacgggcatccccaaccttggcaaaataaactttttcttttttttttttttgagacagagtctctgtctgtcacccaggctagagtgcagtggcacgatctcggctcactgcaacctctggctcctgggttcaagtgattcttctgcctcagcttcccgagtagctgggatgacaggcacccagctaatttttgtatttttagtagaaacggggtttcaccatgttggtcaggctggtctcgaactcctgacctcaggtgatccgcccgcctcggcctctccaagtgctgggattacaggcatgagccaccatgcccggccgcaaaataaacttgctaaattaactaagaactgtctcaaattttcggggttcacagtggcttccaacaacggaaacgtgttctctcacagtcctggaggtcccaagtcgaaggctgacaggtgagtttcttctggggaccttgaaggaggggagggacagggggctaaggtgactcccaaggtggcaggtggatcgtagtcccagctactcaggaggctgagacaggagaatcacttgaacctggcaggcggaggttgaaatgagccgaggtcacgccactgcactccagcctgggcaacagagcaagactccatcaaaaaaaaaaaaaagtgtcagaggaatgcaaacaaatccttacacacacacacacacacacacacacacacactcacaatagccccaaggtggaagcaaatcaagtgtccatcaacaggcaaatggaccgaaacaatgtggtccatccacaatatggaatattattcagccatgaaaaggaagcactgacccatgcttcagcatggatgaaccccgaaaacacgatgctgagagaagccagacacaaaggccacatagcgtgagattccatctgagtgaaatgcccagaataggcaactccatacagccaggaagcagatgggtggttgccagggactggggaaggggaatggggagtgactgctgatggggacagggtctccttttgtggggatgaagatgtcctgggactagtcagaggtagtggctgcacaacactgggaatgcgctaaatgccaccaaattgtacatttaaaaatggctacctttggccgggcctggtggctcacctctgtaatcccagcactttgggaggcaaaggtgggaggatcacttgagcccaggagtttgagaccagcctgggcaacatggtgagacccatctctacaaaacatttaaaaattagccaggcatagtggcacgcgcctgtagtcccaactacttagaaggttgaggtgggacgattgcttgagcctgggaggtcgaggcgagctatgatcacaccactgcattccagtctgggcaagaggcgagaccccccatctctaaaaatataaaataaaattggccgggcaaagtggctcatgcctataattgccaacactttgggaggctgaggcgggtgaatcacctgaggtcaggagtttgaaaccagcctggccaacatggtgaaaccccgtctctactaaaaatccaaaagttagccaggcgtggtggcaggcgcctgtaattccagctactcaggaggctgaggcaggagaatcacttgaacccgggagatggaggttgcagtgagccaagatcatgccactgcactcgggcctgggtgacagagtgagattccgcctcaaaaaataaaataaaatttaaaaatggctaactttatgttatgtgaattccacctcaattttttaaaaaatgaaaatgcgaaacaaatggaaagagaagatatttacactccattttccaaggaaattgttacaggcacccagaaacacccagtcacctaaaagatgtggaattttacaaatacacttcaagcatgttaaatggagtccttcggtgacttaccccttccgtgtaagatttacctcttacatgaagagtttctcttcatgatagctgtcattattaataatatataatgacataattgcttaacaacatcattatgattttccaccccaattatgaggctgaagggcatcaggctgaagcactgaaattacaaggcaagtcagaagtctgctcccacaaaaagagctccccaggatcccaaaatgtggggctcaaactcaaccactgtccccctggccctgggcctccccactctccccatcaaaatggacccattcctgctccaggcaccaattctgctgaacacagaagacacaggaagccatctgcttcctggctgtatggagttgcctgttctgggcatttcacacagatggaatctcacactacgtggcctttgtgtctggcttctctcaacatcatgtttttggggttcatccatgctgtagcatgggtcagtgcttccttccttttcatggctgaataatattctatactgtgcatggaccacattgtgttgatccgtttgcctgtggatggacacttgatttgcttccactttggggctattgtgagtgtgtgcgtgtgtgtgtgtgtgtataaggatttgtttgcattcctctgacacttttttttttttttgatggagtctcgctctgttgcccaggctggagtgcagtggcgtgacctcggctcatttcaacctccgcctcccaggttcaagtgattcgcctgtctcagcctcctgagtagctgggactacaggcgcccaccactacacctggctaatttttgtatttttagtagagatgggctttcaccatattggccaggctggtcttgaactcctgacctcaggtgatccacctgcctcagcctcccaaagtgctgggattacaggcatgacccactgtgaccggccattttttttttttttaaatagggtctcactctgtcacccaggctggagtgcaatggcgttatgagaagggaagtgtgccagccacctctggtgggcagagcatgtcagggagtccaaaagggctgatcaaagagatggctttgccagacacaatggctcatgcctgcagtcccagcactttgggagcctggggtgagataacttgcttgaggccaggagatcaaggctgcagtaagttgtgatcatgccactgtactccaggatgctgtctctacataaataaataataaattatactgtcctccagcctgggtgacaagagcaagacgctgtctataaatacataaataaataaattacacgtggtggctcatgcctgtaatcccagcacttcgggaggccgaggcaggcaaatcatctgaggtcaggagttcgagaccaacctggccaaacccagtctctactaaaaatacaaaaaaaatcagacgggcgtggtggcaggcacctgtaatcccagctactcaggaggctgaggcaggagaatcgcttgaacccgggaggcggaggttgcagtgagccaaggtcgtgccattgcactccagcctggcggcagagagagactctgcctcaaaaaaaaaaaaaaactaataaattttatgatgtgtaaatgatatctcaataaatctgtaagaactaaatgaaacaaaagagaaaaaggagtccctagcccagatatatggcaaagaaagaaagaaaaaaaaaggccgggtgaggtggctcttgcctgtaatctcagcacttttgggaggtggaggcgggtagatcacttgagcccaggagttccagaccagcctgggcaacatggagaaaccctgtctctactaataagacaaaaaaaaaaaaatagccaggcgtggtggctgccacctgtagtcccagctactcgggaggctgaagtgggaggatggcttgagcctggaaaatcaaggctgcagtgagctgagatcgcaccactacactccagccagggcaacagagcaagaccttgtctcaaaagaaaagaaaaaagaaatcactctgaagttagcactcgtaaatcagacatttacaaccacgtacttaaaatgtcccagatgctagtgatgttcataccgctgacattaacagtccagattcgccactctcctggacgtgacccctcggccttcaagtttctgcttaaaaggttgattgttcgtttgtttgtttgtttgagacagaatctcactctgtcaccaggctggagtgcagtggcgtgatctcggctcactgcaacctctacctctcaggttcaagcgattctcctgcctcagactcctgagtagctgggactacaggcgcatgccaccacgcccagctgatttttgtatttttagtagagacagggtttcaccatgttggccaggatggtgtcgatctcctgacctcatgatttgcccgcctcagcctcccaaagtgctgggattacagccgtaagccactgcacccagccttaaaaggtttcttccgggccgggcgcagtggctcatgcctgtaatccgagcactttgggaggccaagacgggcagatcacgaggtcaggagatcgagaccatcctggctaacacggtgaaaccccctctctactaaaaatacaaaaaattagccgggcgtggtggcgggcgcctgtagtcccagctactcgggaggctgaagcaggagaatggtgtgaacccgggaggcggagcttgcagtgagccgagattgtgccaccgcactccagcctgggcgacagagcgagactctgtctcaaaaaaaaaaaaaaaagtttttttctgcctgcctcccctccaatccaagccagagccctgttatcctgccctgagcactccccacttttccctcagccttcccatccgcctgtgactctgtgttgcttggatagagcttcagttaaccctcaggctcctccctgtctggaagctccatgagggcaaagactggcccattctggtagacagctcacactccagcacctgcccaataagaagtattccttagccaggcatggtggctcacacccagcactttgggaggccaaggcaggaggatcatttgagaccaggagttggagaccagcctgggcagcatagggagaccctgtctctacaaacaaaataaaaaattagcagggtttggtggcatgcacctgtagtcccagctactcaggaggctgaagcaggaggatcacttaagcccgggagtttgaggctgcagtgagttatgactgcaccactgcactctagcctgggcaatagaacaagatcctgtctcaacaacaacaacaaaagagtgttcatcagtgtctattaaacgcatactgaggccaggcacggtgtttcacacctgtaatcccagtactttgggagcctgaggtgggcagatcacctgaggtcaggagttcgagaccagcctggtcaacatggtgaaaccttgtctctactaaaaatacaaaaattagccaggcatggtggcacactcctgtagtcccagctactcgggaggctaaggcacaagaattgcttgaaccgggaggtggaggttgccgtgagccaagattgcgccactgcactccagcctgggcaacagagaaagactccatctcaaaaaaaaaaaaaaaaaaaaaaaaaaagcatactgagaggcagcgatagtctgggaattcagtccagactctggagttgaacatagctctgctggcttctccctgtgcttgaagctaacgtctctaagctttggccagagtcaagattttctgccttgtgggccacgtggtccctttcaaaatgactcaactctgtcgtcatcccaggaaagtagccattgccaggcgcagtggctcatgcctgtaatcccgacactttagaaggccaaggcaggataggatctcttcaggcaaggagttcgaaaccagtatggacaacacagaccctgtctctacaaaaaatcagccgagcgtggtagcccacgcctgtagttccaagctacttgggaggctgaggtgggaggatcaactgagctcaggaggtcaaggctgcagtgagctgtgatcgtgccactgcactccagcctggaagacagagccagaccctgtctcaaaaagaaaaaaagtagctatagatgatggatctatgaatgggtatcactgacagtaagatgtatttatgcacactgaaatttgattttcatataatgtttgtgtttcacgaagtactattcttttttttccaaccattcataaatgtaaatccatgcttagctcatgggccaaatgaaagctgcagtgcccacatattatatgattccattcatataaaaatgttggctggtgcagtggctcacgcttgtaatcccaccactctgggaggccgaggcgggcagatcacctgaggtcaggagttggagaccagcctgaccaacacagtgaaaccctgtctctacaaaaaatacaaaagttagccaacatggagaaaccctgtctctagtaaaaatacaaaattagccgggtgtggtggcaggtgcctgtaatcccagctactcaggaggttgagacaagagaatcgcttgaacccggaggcagaggttgcagtaagccgagatcgcgccattgcactccagcctgggcaacagagccagactccgtctcaaggaaaaaaaaaaaaaaaaaagcctagaacaggcaaatccatagagacaggaagcagattggtggttgccaggggctgggggaggggagtggggagtgactgctgatggggacagggttttctttggcggcgacagaaatgttctgcagccagacagaggtgacattcgcagagcactgaatgtagcaaatgccactgaattgtgcactttaaaatagtgaatttcagctgggcgcagtggctcacgcctgtaatcccagcactttgggaggccgaggctggtggatcacctgaggttgagagttcgagaccaccctgactaacacggtgaaaccccatctctacaaaaaatacaaaagttagccaggtggagtggcgcacgtctgtaatcccagctacttgggaggctgagacagaagaatcacttgaacctgggagatggaggctgcagtgagccgaggtcgcgccactgtactccagcctgggagacagagtgactgtctcaaaaataaataaataaatgaaataaaataaaatggttaatttcaggttatgtgagcttcacctcgataagaacatatatacatatggatataatttacataggaatatgcatagaatgtaaagaattacactattgatattttgatttttttttaagctgcaagccaccatttgccagcctccaattaagataaataaaaatagctcccagagatggaagggttcttctaggaaaaatctttttttttttttttttttttttttgagagagagagagtttcgctcttgttgcccaggctggagtgcaatggcgccatctcggctcactgcaacctccgcctccagggttcaagcgattctcctgtctgctaccttcataaacacatgatgggcaggcattctcatgcccctttgacgaatgagggactgaagttcaaaaagaaaacatcaggccagcgcagtggcccacgcctgtgatcccaacactttgggaggctgaggcaggcggatcatcactgggatcaggagtttgagaccagcctacccaatatggtgaaaccccgtctctattgaaaatataaaaattagctgggcgtggtggcacatgtctgtaatcccagctattcaggagactgaggcgggaaaattgcttgaacctgggaggcagagggttgcagtgagctgagattgcgccactgcactccagcctgggcaacagggcgagactccatctcaaaaaaaaaaaaaaaaagaatatcattcactcaaggtcaacaagtacaagtgccagaatctaaactcagggctccagctgtccatcgcttacctcactgaacagaccaactgggaggattaaatgagaaaatacatccagacaagcctggccaacatggtgagactcccgtctctacttaaaatacaaaaattagccaggtgtagtggcgtgtgcctgtaatcccagctacttgggaggctgaggcaggagaatcacttgaacctgggtggtggaggttgcagtgagccgagatcgtgccacttcactccagcctgggtgacagagtgagacctggtctcaaaaaaaaaaaaaaagaaaatacatccagatcctcagcatagggcctggtatacattaggtgctcagtaagtattgctctctccccctcttctgtcctgtgtgtcaataagagcgaggcagtaatggcctggctggcaagaagatgatgagaggttctgatgggaacccatcagtcatcagcccagtgcaatcccgcatcttccccaagcactcgcgacctatttatgtagtagtaagaaaactccagaggcagggccaggcgtggcggctcaggtctgtaatcccagtgctttgataggcaagggcagaaggatcgcttgagcccaggggtttgaggctgcagtgacctatgatcacaccactatactccagcctgggagacagagcgagaccctgtcaaaacacacacacacacacacacacacacacacaaactccagagacaaccaggcaaatcacaaagtgacctttcctatcagacctcagctccaagcattgcagcgacaaggtggtgacccgagataagaagcgcacttgcagagggtgcctctgcccgtatctctccgcatcctcaagaaacacagaactatcaaacatttttgcaacatgaggagccaagttttgcaacatactgaaaaagggttgtgcaaacttcagcagaaacaccccaattgccccagctgggagtcatcatccagttgctgctgtaatgtgattgtaattcctccagtgttcataatttgtcttggaagctcagctgtattttacatgacgtgttttctgtagaattcctgagtacttgctcttgggatctgagccaagtgcacacaatagctatttggggcaaaacagctggtaaagagaaaggcagcttagaccctgaagaaaagtggaaagaattcaaggttactagaaatgtccagggcccagtaaaagaagattgtaatctctctatgtgcagaaacaggccatatacttcatcagtttcctctccatgctcagctcagcatggagcggaagctcagtatttatttgtggctcagacgaaaaacttcttgtttgcaagtttcctgagcccttgaagacagcctggcaggagacaacaaatgcaaagctgcacacgtaccacttatccaatcccctgttagtgacagacatcaccagtcaatcagtcaatcacagacatgaccaatccatcacagcactgggcctggctacaacctcagaatctgcaccagcacagtgctaaaagcaactattatcaacagatttgaggaaaatattctgcctccttggtctacatttataatgttgagttgttaggagaagataaggggcagcaagaaagagatgacaataagataatcaccatcgaggctgggcactgtggctcatgcctgtaatcccagcactttgggaggcttaggcaggaagatcacttgagcccaggggttcgagaccagcctgggcaacaaagtgagaccctgtctctacaaagattaaaaattagccagccaggccaggcacggtggctcacgcctgtaatcccagcactttgggaggccaaggcgggcagatcacctgaggttgggggctcaagaccagcctgaccaacatggagaaacccagtctgtactaaaaatacaaaattagccgggcatagtggcgcatgcctgtaatcccagctactcgggaggctgaggcaggagaactgcttgaacccaggaggcagaggttgtggtgagcagaggtcgcaccattgcactccagcctgggcaacaagagcaaaactccatctcaaaaattaattaattaattaattaaataaaaattagccagtcgaggtagtgcacacctgtaatcccagctactcaggaggctgaggcgggagtattgcttgagcctggaagttgaaggctgcagtgaactatgatcgcatctctgcattccagcctgggtgaccctgtctccaaaaaacaaatcatcatcaggaaacataaagttcccaacagtggccaggtgtggtggctcacgcctgtaatcccaacactttgggaggcctaggtgagtggatcacctgaggtcaggagttttagaccgagtctccctctgtcacccaggctggagtgcagtggcatgatcttggctccctgcaaccctgcctcccagattcaagtgattctcctgcctcagcctcccaagtagctgggactacagatgtgtgccaccatgcctggctaattttgctttgtttttgagatgaagtctcgctctgctgcccaggacggagtacaatcagctcactgcaacctccaccttccaggttcaagggattctcctgcctcagcctcccaagttcccaagtagttgggattacaggcacctgccaccatccctggctaatttttctatttttagcagagatggagtttcactatgttggtcaggctggtcttgaacctcaggtgatccacccacctcagcctcccaaagtgctgggattacaggcatgagccaccacacccagctaatttttgtatttttagtagagacgaggtttcaccgtgttggccaggctggtttcaaactcctgacctcaaatgatccacccgcctcggcctcccaaagtgctgggattacaggcgtgagccaccgcacccagccaaggcttgcagagctctgagggtaaagtcacctaactagttccaggcagggctgagaatgtgacttcatgcccggtgctctttctccaacatcatcattggctgggacttcacgaggacagatacctgtgcaggcagatgccaaccagatagcaggttcataggacaacagcaggagcgggtctgtgctccaggccccctcccagtgccaagcctctcctgcacagagagattccacagtgcctgagatcccctaaaaggctcattcactcatcttcacaatcagccagcaagtactgttgaacactgacaaatgccatctcatattctcaaaaggaaactgaggctccgagaggttaagtggcttgcctaaggtcacacagctaatgtggcaattaaaattcttctaggtcgggcacggtggctcatgcctgtaataccagcactttgggaagccaaggcaggaggatcacttgaggccagccaggagttaaagaccaatctgggcaacacactgaaacctcatttctcttttttttttttttttttttttgagacagagtctcgctctatcgtccaggctggagcacagtggtgcgatctcggctcactgcaacctccacctcccgggttcaagcaattctctgcctcagcctcctgagtagctgggactataggcgctcaccacaacgcctggctaatttttgtatttttagtagagacaaggtttcaccatgttggccaggctggtcttgaactcctgacctcgagatccacccgcctcagcctcccaaagtgctgggattacaggcgtgagccaacattcccgcttttttcttttcttttttttttttgagacaggttctcactctgtcgcctgggctggagaacagtggcacgaactcagctcactgcagcctctgcctcccgggttcaagcgattctcatgcctcagcctcccgagtagctgggattacaggcacgtgccaccacgaccagctgatttttgtagtttttgtagagacggggtttcaccacggtctcttttcacgctggtcttgaactcccgacctcaggtgatctgcccacctcagcctcccaaagtgctgacattacaggtgtgagccactacacctggcccacaagaccagcccacgagacctcatttctgtaaaataaaatgaaaagttcgtgttctttccatgcactggcagctctctgcattggttctgctggccaggcactctgctgaaatgtttcacgctgccctgggaggtcctcagtgggtggccactgtctttacatcacttttgtttcaacaaatcgggtccacagctgggcccagggggacacagagatgagtcaagggaggcccctgtcttgaggggttcaccgtctggggaggaagccaggcgggagaacagctggttaccacgatgtatgagtttcctgtggtggccgcaacaaaagacatagactgggtggcttccaacaatggaaatgtattccccacagttttggaggccaaaagcccaaaatcaaggcatcagcagggttggttccctctggaggctccgagggagaatcttttttttttttttttttagatggagtctcactctgttgcccaggctggagtgcagtgagtgcaatctcggctcactgcagcctctgccttccaggctcaagcgatcctcccacctcaacctcccgagtaactgggaccacaggtatgcgccaccatgcccagccaatttttgtattttttgtagcgagggggtctcactttgttacccaggctggtctcaaactcctgggctccagtaatactcctgcctcggcctcccaaaatgttggaattacagacgtgagccaccacacccagccatctgagaaagaatctgttcccttggctaggtgcagtggctcaagcctgtaatcccagcactttgggaggctgaggcaggcagatcacttgaggtcagaagctcaaaaccagcctggccaacaggatgaagccccatctctactaaaaatacaaaaattaaccgggcatggtggcatgcacctgtaatcccagctacttgggaggctgaggcacaagaattgtttgaacccaaggggtggaggctgcagtgagccaagatcacgccactgcactccagcctgggctacagagggagactctatctaaaaaaaaaaaaaaagaaacaaaaagaatcttttcccagttttgctgctggtggctccggagatatccctgggcctgtggctgcctcactccaatctctggccatcttcacatgcccttcttctctgtgtttgtgttcctgcgtcctttctctcctaaggactcttgtcgctggatcagggcacaccttaatccaggatggtctcacctcaagacgcttcatgatgtctgcagagaaactctttttgtttttgagacagtctcactctgtcgcccaggctggagtgcaagggtgcgatctcggctcactgcaacctccacctctcggattcaagtgattctcctgcctcagcctcccaagtagctgggactacaggcgcaagccaccgtgcctggctaattttatatttttagtagagacggggtttccatgttagccaggctggtcttgaacacctgacctcaggtgatccacctgcctcggcctcccaaagtgcttggattacaggcgtgagccactgtgcccagccaaagaaactctttctaaataaggtcatagtcacaggtgccagggattgagactcagacatttctttgtggggccactatttaacccattactcatggattgaattactcatggcaagaccctgtctctacaaacaaaaatcagccaggcataatggtgcacatctgtagtcccagctgcttgggaggctgagctgggaggatggcttgagcctaggagtttgaggctacagtgagccatgaccgcgtcactgcactccagcctggatgacagagcaagaccctgtgtcaagataaataaataaataaactatggattattattattattagttaataacaatatattcctctctgctcagtaattgtcacaaatgcaccacactaatgcaagatgataataggagaaaggttggggtggtgcgaggggtgctacctgggaacgccgtgtacttcgtgctcaatttttctgtaaacctaaaactgctgtagaaaataaaagtccagaccaggcgctgtgagtcacgcctcccaaatcccagcactttgggaggccaaggcgggcggatcacttgaggtcaggagtttgagaccagcctggccaacatggtgaaactctgtctctactaaaacaaaacaaacaaacaaacaaaaattagctgggcatggtggcgggtgcctgtaatcccagctacctaggaggctgaggcaggagaatccctggaacccgggaggcggaagctgcagtgagccaagattgagccactgcattccagcctgggcaacagagcaagactctgtctcaaaaataaacaaataaataaagtacgttagttaagggaggttgaaaaaaaagagagagagagagacaggcagagacgacggagcttcacaattggaaatggaaagaaaggaacgctggtcgggggcgcagtgagcgcagaggggaatgtgcttggtgtgtttcaggacccaaacagagacagtgagagaggaggaaggcagagaggtacctcagacaagctgcaggtgccagtgagcaaggctcagaggcccaggggaccaaggtgctctctgacaaactagagggatgctgtggtcagaggtctttttttttttttttttcttttaattagacagagtcttactctgtcaccctgtcacccaggctggagtgcagtggcacggtctcggctcactgcaacctccacctcccaagttcaagcgattctagcctcttcagtagctgggattataggcacacgccaccacgcccggctaatttttgtatttttagtagagacagggtttcaccgtgttgaccaggctagtctccaacttctaaccgcaagtgatctgcccgcctcagccttccaaagtgctgggattacaggtgtgagccactgcgcccagccgacggtcttggccaaagcaaaggaacaaacaaacaaaaacccttcccggcagctgcccaggcatcccatatccttgaggagaaattcctgattcccttaatctttccatcattatcatacggggaaactgaggcccagagaaaggcaattcaattcccaaagcacacaagcaggcccatctcccaagcgctggtagagaattcagtgtcacacaagatgtcacctacttccacaacaaagaaaagagcctgtgtgaactcacaatagccatttggggtaaggtactattcttatctgcatttcgaagattgaggaggcaagcccaaacagccaaagccactggttcaaggtcacacagcgcgtgctcagtggctgaggctgactcgcagccatttcagtggcaactgcagaaagcaagtttgtattcaacttgaagtctccggtgactgggtttggtgggggctgcagaggggaccctgcagagtgcatttctgcagaggctgagagtccaagcttccagggcaggagctgcctgcatccctcaccacctggctccaagttcctccttgggatgctcttcctcccatacccacatggtccccaatgactttttcacattagctcacatttcaccccctgggtgagattcagaatttccccattttctccttcccactccctcatctcacactcactttctagtcccttctactgctccatttttctttttaaacccctatcagtaaggccaggcgcaatggctcacacctgtaatcccagcactttgggaggccgaggcgggtggatcgcctgagcccaggacttcaagaccagcctgggcaacatagtgagaccccgtctctacaaaaaaatacaaaaaaaaaaatttagccaggcatggtggtgtgcaccttgtaatcccagctacttgggaggctaaggcaggaggatctcttgagcgcaggagttcgaggctgcagtgagctgtgattgcactactacactccagactgggcaacagagggagaccctgtctcaaaaaaactcaaatgaataaacctctatccttccctccttcactaaagtggaggtcccctagggcagggatcttgtctatctcttggttactgtgtccccagtgcctacccagggctggcagacagttgtaacaggagtgacagtccctggccagcagggatatggtgtgggggacagaggtggagcattgaagggacccattgggcagcattgtcctctgatgcccccgatgctggagctgtattgggggaatgactgtcatcaccgtcctctgagttacttaattcatttatggaagtcagtaaaggaacccagcctgcctgtgcctgccgcaactccaacttctcccagccacctctgcctcagtttccctgcacttgacgggcttattgaggttggggaggagggggtgggtgtctcaaatgtcaaagatttaatgtgtcttgatgttaccacacaaaagttttgttttgtttgtttttttgagacagtctcctctgtcacccaggctggagtgtagtggtgtgattgtatctcactgcagcctcgacctcctgggctcaagcgatcctcccacctcagcctcccactacacccagctaattttttttattttttaagagatgggggccactgtgttgcccaggctggtcttgaactcctggcctcgagtgatcctcctgtctcagcctcccaaagcggtgggattacagatgtgacccactgcaccaggtctacacaaggtgtttttttttacagggtgatgtgcacacggtgggtccctctgggtggtcccacaacagatgaggggcccagcctcacccatccatgaatcctggagactccagacttcccatccatccagggttctgcagccctctctgaggctggagccaatctccccttccgtcaagggatccggggagaccgccaagcccggtgctcccctgagagtctctgagaggccccgacaccgcccccgctccaggtccccgggatgctcgcgcaggcgggagcccggggcgcccgggggatccctgagcgtcacgccgctgttgtggagcgcgtgttgacaacgtcgccggggagacgggcgggggcggggcccgggagagggggaggcgcggccctggcggcgcgcgaggggccgggctgtcagcgcaaggcccaggccgccgcagtggccacggccgctgccgcccgccggcttatataccgcggctaaatttaggctgcgcccggagctcgtccccatccgggacgcgtttccgccgccgccgctttggcccggcccccgcgcgcgccgcgcctataaggcttgggcgggcccggccgcggcccacagagccgtccccgcccgcccgcgccccgaccagcccggcctcgggcagccactcaccggtgtccccgtccgcgtcctttctccccgggtcccggccatggcgctgagtgaacccatcctgccgtccttctccactttcgccagcccgtgccgcgagcgcggcctgcaggaggtgagggcggcggggacggcggggcggccgggaccgtgggcggcgggctcggggtagtagaacgtgggctgcggggtgacaggacgcgaaggcggggactgcagactcaggagaggaggatgcgggccacggggatcgcggacttagggtggtaaaaggcaagcagcgccccccgagccccgccgcccgctcacgcccattgccctgtcgcccgcagcgctggccgcgcgccgaacccgagtccggcggcaccgacgacgacctcaacagcgtgctggacttcatcctgtccatggggctggatggcctgggcgccgaggccgccccggagccgccgccgccgcccccgccgcctgcgttctattaccccgaacccggcgcgcccccgccctacagcgcccccgcgggtggcctggtgtctgagctgctgcgacccgagctggatgcgccgctggggcccgcactgcacggccgctttctgctggcgccgcccggccgcctggtcaaggccgagccccctgaagcggacggcggcggcggctacggctgcgcccccgggctgacccgtggaccgcgcggcctcaagcgcgagggcgccccgggcccggcggcttcgtgcatgcgaggtcccgggggccgccccccgccgccgcccgacacaccgccgctcagccccgacggccccgcgcgcctgcccgcgcccggtccgcgcgcctccttcccgccgcctttcggtggccctggtttcggcgcgcccgggcccggcctgcattacgcgccgcctgcgcccccagccttcggtctcttcgacgacgcggccgccgccgcggcagccctgggcctggcgccccccgccgcccgcggtctcctcacgccgcctgcgtccccgctggagctgctggaggccaagccaaagcgcggccgccgctcttggccccgcaaacgcaccgccactcacacctgcagctacgcgggctgcggcaagacctacaccaagagttcgcatctgaaggcgcatctgcgcacgcacacaggtgggcggcacgcacgagccaggagcgcaggcggggggacgcgggaggagaggtcggattcccagcgcgcgccagaaaatgaatttaggacctcccttggggcgtggctcagggggatctggcaggtggtgcacgcttaggactccccaggaggcgtggctcgggaggttggttgggggggcacacaggaacactccctaaggaagtgtgatccgagaggttggggtgggggcttgcacgcttaggacgaggggggcctccggaggttgggaagagcacttagaaaacctcctggaggcgtggctagggagacagtctcagaaagttggggagggggagcaggtttaggagccgctgggcacttggctcagaatccccggggctgaggctcaggtagttggggagtaggtgcgcgtttaggaaccccggggagatgctgcgtctcaggaagttggggagggcgctcaggcttgggactcctctggggacaaggctcaggaccttggggagggagtgttcgctgggaaaccttgagagattccgtgtcttagaatgctggagagagggtgcatgcttaggacccgtcggggagcgtggctgacaacagtggggagtggaccttgcgctcctccgaccccctgggggtgaggatccggattgtggggggagttggggatgtagggcaaggatccctcaggggcgcaacactaccgcggggagcgcgtcaaggccctggttagggataggttgcgctcgccggggtagccatacgtgccctgtcctgggaggggaactgacgcttactctcgccccctccctgcaggtgagaagccctaccactgcaactgggacggctgcggctggaagtttgcgcgctcagacgagctcacgcgccactaccgaaagcacacgggccaccggccattccagtgccatctgtgcgatcgtgccttctcgcgctccgatcacctggcgctgcacatgaaacggcacatgtagccgggacgcccccgcccacctgcgcgcggccgtggcgggtcccacgcgccgggcgcggccccctcccaaactgtgactggtatttattggacccagagaaccgggccgggcacagcgtggctacagagggtctccctcgatgacgacgacgacgacgccaccaccccagcccccgtctgtgactgaaggcccggtgggaaaagaccacgatcctccttgacgagttttgtttttcaaaatggtgcaataatttaagtggcatcttctctcccaccgggtctacactagaggatcgaggcttgtgatgccttgtgagaaataagggccttaatttgtactgtctgcggcattttttataatattgtatatagtgactgacaaatattgtattactgtacatagagagacaggtgggcatttttgggctacctggttcgtttttataagattttgctgggttggttttttttttaattaaaaagttttgcatcttttaaaaaaaatcacagcactggtctggttgcttggaactggggccttggggcacttgggaggaggggggagcggagagtttgatggagggcagccccactaaagcatcgtgtgcagtgggtcctgcgtctgccagcaccgggactgccagctgctgtgcctgcctgccaggaacctgtgggtttttctgtaaatttagacactgcattttaggactgagggagggttattttaaggttgttctttgagccataaattgcctctttgccccacagctggggaaagtgctggtcccactgacgtggcctcctctacgttgaaaaaaataaaactacttacctcttcctggaagcctctgaggttttagccaaatttctggagtgccagctctatatttttatttttatttttaaagggggttaacctgctgagtttctggcatgttctgccctttactcgtctcgacatttagcaagtcttttcttaaggggtgagttccccattctgctagcggaaaacagtgaaacctgcattcgagggccatgcatgaagctcttttccagatgaggaaacggaggcccggagaggtagcggcagggtggtggagttgggttgttagcctgctctgtctgcctccaagggtccctgaaccccactggaagggagtggtagctttctacaatgacccacctgttgtgtgcattggaaggctaggagagcctcctcccctgtaggtctcctggtgcaaaaaattcactgcctcaatggtaggaggtgaccagtctggaaacccacctggagagcagaggagacccctaaatcccaccaccccaagtgtctcaggcaaggaggtatctctccccccagatttcacctgccacccctcaccttccccattctcaggggccccgggtaaccatgaccaccaaccattgcacaagtttccagaaagtgaaaatagctcgtaagcagcgcctgctttaaaacactctcaccccgttgcgacagaggctgggatttcctccctccctgcatccttcctcctccccaactacggcagccctggaaacagctgagaggtgtttggtaatccacgaaaagcagaaatacgatttgacaatctgattcattttccgagagtaaatagcctggcctcacttccgctgctgatgaagggtgtgaatgtttttgagcctcctgtaccctctgcgtgcagcttctgcaaaaaccgtcccaagacagaatgttggcccctcgacctggggagatgatccccctttttaaaagctggcctctgcagtgcaggggcagaagaaggactcgcgggtggtttaaaacaatattaagggtctccaggtttccctgttcagcttaaacttagtgatcaagctatttttcttgcttatttgaaaatgtcttccaggtttctcctggaagcttctgagtccagtgaaaggcaaatcgttcacggggctgaagctgtttctgtttcttgcgtgtatgttctgttggagaacagacagaatagaaagtgtgatagttgtacgtttcagtaagagacaccaactcaggcagcgctaggtcataccgactaatccagaaatatcccatcatcatttttttctgcccctttctgacactcaaatgccaatttccatgatcttctgcatctgtgatgctcagtggagagtgacccagtctgggaacatttttggttgtcaactcgggggtgctgctggcatctggtggacagaggtgggtgatgttgctaagcattctgcagtgtacagacagcccccaccacagagaatagcccagctctgaatgtcagcagtgctgaggttgagacatcgcctctggttcctaaaagatcattgctcttatcagcaagaaggtgactctgtgccacgaagcaagctttggtggcaaatgccacccagaaaaaggtacaaagaaaacctcaccctggggccatcttcacctaggattctacaacccaatcccaatgcaagtttttctttctttctttctttctttctttctttctttctttttttttggagacagtctcgctctgttgcccaggctagagtacagtggcacaatctcagctcactgcaacttctgcctcctgggttcaagtaattctcctacctcagcacctcctagtagctggtattacaggcgcgcgccaccaagcccaactaatttttggatttttagtaaagatggggtttcgccatgttggccaggctggtctcgaactcctgacctcaggtgatccacccacctcagcctcccaaagtgctgggattacaggagtgagccaccgcacccaaactctctctctctctctctctttttagagcaggagatttgtggtcactggctgaattacttttcatggctgtgattttcgctatattctttcttttccccaggcaaagttataatcatttgtcgatgctgttttttcccccagttatacatttgtattgtcattttcatggctgcataatattccttttagatatggcaggagttatttatggaaacaagcactgtgggtaaaagggttgaaaagggtgaaggttttattttgtttggtttgagatagggtctcatctgtcacccaggctggagtgcagtggcacaatcactacaatcttgacctcctgggttcaagcaatcctcctgcctcagcctcccgagtagctgggattacaggcatgcatcaccatgcccagctaatttttacatttttttgtacagaggggatctcactatattgcccctcctgggctcaagcaatcctcccgcctcagcctctcaaaatgctgggattaaagatgcagaccaccaagcccagctatggcagggggtgggggagaggtgacagttttgaggggcttattggcatggtgctggggagagatgtaggagctatttttctgctaggcacttcctgtagttctgggggccccagcacccaggcaggctgcagaatgatgtggtgtgaagtgggaggaggaagggggcgttgtcagagggcaagatgtctataggctcacccctgactcagcacccagccctgtcaacacggttgagtcagcacccacgcccggcagccccaggtggagtcccaggaccataggctcaagctgatttgtcaggtgccagggctgggtggctccgattgccccggcctgagctgtgtcagctgtgccagaccagcgagcatcagccttggagctgggcacagcggtggctcatgcctgtaatcccagcactttgggaggccgaggtgtggggatctcttgagccaaggagtttgagaccagcctgggcaacatagagagaccctgtttctgggtgggtggggggcgggggaagagagagagaagagagaaaaaacaaaagacatttggagctgaatcattctccagtgcggggccaccctgtgcactgcagtgttcaacagcatctctggccttcaccgactcaatgccaattaacacccgtcccctggccagacccgggggctcacacctgtaattccagcactttgggagggcaaggcgggtggatcacttgagctcaggagttcgaggccagcctggccaatatggtgaaaccctgtctctacttaaaaaaaaaaaaaattagctgggtgtggtggcaggcgcctataatctctgtcatctcagctacttgggaggctgagtcaggagaatcactggaacctgggaggcggaggttgcactgagctgagatggcgcctgggtgacatagggagagtccatctcaaaaaaaaaaagaaagaaaccctcagatcagccgtgcgactttgcctgcctgtgcctcagtttccttgggtggaaaatgagtttgctgctgtgaaaatgaaatgagacactaaagctcagagcccacccctggggtgtggccagcacagtgagtgtcctctgataaagctggtgtgcctgaattttaaggccccttcctccctctctctccctctccccacaaccctcttcgctcattcattcattcattcacctgttcattcagcagatgctctgtatggcaagcagatatgactcagaatctcaggagtgactctggccgggcgcaatggttcacacctgtaatcccagcactttgggaggccgaggcaggtggatcacctgaggtcaggagttcgagaccagcctggccaacatggtgagaccccgtctctactaaaaacacaaaaattagctgggtatggtggcaggcgcctataatcccagctactcgggaagctgagggacgagaattgcttgaacccgggaggcagaggtttcagtgagctgagatcacaccactgcactccagcctgagagacagagcgagactctgtctcaaaaaaaaaaaaaaaaaaagtgacgtagcctctgggccttgcccagagtcagtgccaaaatgtttgtcgcatgacctaactttgtgctaacggtggaccctgtgactcgagcttgggtgctttcattctgggcaccttcaacaaattatctctttcaacctccccacaagcctgagggttgcctaagcacccccattttctagaggtggaaagtggggttcagagaggggaaggttagctgggggacctggtgcaggtggcagagctgaggcttcaacccaggtctgcctggcctggccaccgcaactcctcctgtgcctagaaacatctgaatgcaccaatgcatcaggtttgccctgtttccctccacacacaggttctaggggttcctggaagccctgctgagttccttctaggcttttgtctaaaaggaactgagaagcccatttgccaggaatatcccagacagggagggacaaggggtcgggaagaggctgggtgaatagggttccctgaggtgccctataagaagttaggaggaggccgggcacagtggctcacgcctgtaatcccagcactttgggaggtcaaggcaggtggatcatttgaggtcaggagttcgagaccagcctggccaacatggtgaaacctcgtctctactaaaaatacaaaaattagcttggagtagtggtgggcacctgtgatcccagctacttgggaggctgaggcaggagaattgcatgaacccgggaggcggaggttgcagtgagccgagatcacaccattgcacactagcctgggcgacagaggaagactccatctcaaaaaaaaaataataataagttaagacgagcctgggggccagacaccatggctcacgcatgtaatcccagcactttgggaggccaaggcaggtggattactggaggtcagaagttcaagatcagcctggccaacatggtgaaaccccatctctactaaaaaaaaaaaaaaaatacagaaattagccgggcgtggtggtgcacacctgtaatcccaggtactcgggaggctaaggcaggagaatcacctgaacccaggaggcagaggttacagtgagccgagattgcaccactgcactccggcctgggcaacagagcaagactctgtttcaaaaaaaaaaaaaaaatgctaaacatggaattgccataggtcccagtgattccattcctaggtatagtcccaagagaaataaaaaccgggacacaaacagatacttgcacacacgtgttcgaggcagcaccatttacatgcgccagacggtggaaacagcccaaatacccatcaactcatgaatcaataaaagtgtggtatatccatatgacccagtggtttttgtgtttgttttttgggataaggtctcgctctgttgcccaggctggagtgcagtggtgcgatcacagctaactgcagcctcgaacccctgggttcaagcaatcctcctgcatcagcctctcgggctggttcttactgggggctcccctgagtgcagagaacaggcccaagctgatgccagttagggaagtcatctctatagttctagaagggatactgagcccaggaggctggagacaggggcctcaccaaccctctgctcgtagcctgagctctttctccagcgtgatttgatctgccccatcaccgtgttcttttctctctcatcccatattttctttctttcattctttctctttattgtgattaaatatacataacataaaattgactgtttttgttttgttttgtttgagacagggtctcactctgttgcccaggctggagtgcagtggtgcgatcacagctcactgcagcctcgacctcctcaggctcacgtgatcctcccgcctcagcctccagagcagctgggactataggagtgtgctactacgcctggctaatttttctattttttgtagagcctgagtctcactgtgttacccaggctggtcgcaaactcctgggctcaaatgaaccatccaccttggcctcccaaaatgctgggattacaagagtgagacattgtgcctggctaaaattcactttttttttttttgtgacagagtcttgctctgtcacccaggctggagtgcagtggcacgatctcggttcactgcaacctcccacctcaagtgattctcctgcctcagcctcccgagtagctgggattacaggcgcacgccagcacagccggctaatttttatattttcagtagagacggggtttcaccatgttggccaatggtctcaaactcctgacctcaggtgatccgccccccttggcctcccaaagtgctaggaatacaggcgtgagccaccacacccagcacaaaattggttatttttaagtgttcagttcagcagcattcacagcattgtgccaccttcaccaccacccatctccagagcttttcccttcttcccaaactgaaactttgatcccattaaacactcacttcccattctccctccccagccactggcccccacccttcttccttctgtctctacaaatttgagcactctgaggacctcctaggagtggaatcatacagtatctgtcctttcctgtagtttatttcactcagcataatgtcttcaagattcatccacgtggtagtgtgtgtcagaatttccttcctttttatgactcagtaatattccattgtgtggaaggaccacattttgtatgtccattcattccttgatgaacacttggtcatttccaccccttggctgctatgaacatgagtgtgcaaatacccattccagcccctgctatcagttttttggggctgtgtccctaacagtggaatggctggatacccttttttactttttactgttagtattttttgagacagagtctcactctctcgcccagcctgcagtgcagtggtgcagtctcagctcactgcaccctctgcctcccgggttcaagtgattctcctgcctcagcctcccaagtaactgggattacaggcgtgcaccacctcacccagctaatttttgtatttttagtagagacgacgtttcaccatgttggccaggctggtctcgaactcctgacctcaagcgatcctcctgcctcggcctcccaaagtgctgagattacaggcgtcagccaacgcgcctggcctgggtatccttttttaaactttattcgtggctgctgataacgctcaaaagagtttttctttccttagcagctcgcctaagagccattgacccaggctgagcatcgtctgcgagcctccctgagagctcagattcacaccagccggcatctgtcgcctcagcctgcaacattctgggcctcgatttcctcttctttgaaatgggggtaacagcgcagagcagtgggagcacggccggtgccctggccttgggggccgcccggaaatcggggttttgcagcagcttgggttgtgcagagaggcagaggctgtcagggagatggacgggcctgaggtggaggtgccgctcacacccggcacacccgccgcctgctcagcccacagcctgctctgcgcagccagctctgcgcagccagctcccctccccacctaggccccggccatctcaagacagcctcctccggaggggacacagactcctgcacaccagacccagagactcttaggccggcgactaaactgaaaagccctcactctgcagggtggggaaactgaggcccgggtatccaaatcctccggcagacagacgccaaccgacctacatgggtcttggggtcttcctgagccacaaacgcaaatcccacaggaggagctggtccctcaggtggggttcctaccagggacatggcttgccaggatttgaccccgttttaacctagaacagccaggtgtgctggctcatacctgtaatcccagcactttgggaggctgaggtgggaggaccacttgaggctgggagtttgagaccagcctggggaacatagcaagaccccatctcttaaaaaaagagcgtggtagcaggcatggtagcatgcatctatagtcccaactactcaggaggctgaggtgggaagatcacttgggcccaggagtttgaggctgcagtgagctatgattgtgccactgcactctgatatgggtgatagagcaagaccctgcctctaataaataaataattatttttataatttattataaaattataaatgttataaaaattaatttaatttaattaaataaaaaaagcaaggtagctcatgcctgtaattctagcactttgggagaccaaggtgagcagatcacttgaggccaggagttcgagaccagcctggccaacatggtgaaaccctgtctctactaaaaatacaaaaaaaaaaaattaagccgggcgcggtggtgtgcaggtatagtcccagctactcgggtggctgaggtatgagaatcacttgaacccaggagatggaggttgcaatgagccacgatcacgccactgcactccagcctgggtgacagagtgagtccctgtctcaaaataagtaaataaataatatcatctagaacgatgtaaacagaacattgcattgacattttgtcaattgccacaaaattgacattttgtcaatggtttgtcattgcaagccattttgttttttctctccccgccatcccccctcctttttctttaaacatggggagtttataaatccatgagacctaacaagcagctataggacactccacacaacagcaggacacactttcttcttgagggtgcaaggaacattccctgggagaggccaaagaataaatccagtgcattgaaaaggatcgcaattctataaagtatgtcctctgaccacaatggaatgaagtgagaaataagaaacagagaggaatttggcaaacttaagaaatatgtagaaattcaagaacgcacttgtaaagacaaggaggacctactctaagattcatcagaaaatcccagcatttgagaccagcctgcgccacatggtgagaccccatccacagaaaaaatacaaaaaatcgccgggcctggtggcgtgcacctgtaatcctagatactcgggaggctgaggtgggaggatcacttgaaacagggaggtagaggctgcagtgagccgcgatcgcatcactgcactccagcctgggcaacagagtgaggccctgtctcaaaaaaaacgaaaagaaaagaaaaaaagaaaaaggccatgtgtagtggcttacacctgtaatcccagcactttgggaggctgaggcaggtgaatcacctgaggtctggagttcgagaccagcctggccaacatggtgaaaccccatctctactaaaaatacaaaaaaaaaaaagacaacacacacacacacacacacacacacacacacacacacacacacaaaacaaactagctgggcatggtggcaggcacctataatcccagctactcaggaggctgaggtaggagaatcgcttgaacccgggaggcggaggttgcagtgagctgagatcgcatcattgcactccagcctgggcaaaaaagcaacactccacctcaaaaaaaaaaaagacaaaaaaacattctagcagtgggaaggtcctttaggggcctaagctcctgagtggggaccagtccggctttgtgcagggactcagtgcacctggggctctctctgcagatatgagatgtgcatgggctcttctggatgttgccctagtgagttctgagggctcctgtgggctcgtagcttctagagtggatgattcccccaagatcactgtggggaacaccaagagtggctgctccccacagcttcaaggctgccagtggggactccactggaggtccgcttctggggggctgccacgtgtccccagctttagtcaggacccctcccacaacagcatcccctgctcccatccacatctccaggtcctccaactcctgtgacccttccccaatcccacatctttgcacaggctgttcctcatggcaaaaagcccttcctgtgtgtccgtggggcagatgccagtccgccccccaaggcctggctccggcatcacctccactgggaagcctgccctgattcccatagaagcaccccagcctgccccgtgccagcttggacctcacagggtgggagcgccagatctgtggctggctcctccttcccactagactgggcagcagcagagaggggtgctgaatgactcgggggacctggttgacaaggggtcaggaccgtgaaggggacagtggttttactcccctgtcatagtcacagagagcaacacacaaaatccaaggattcctgggatgacagaatttctgacctcaaggccaagatgatgctgggtagagtgtgcagcgtgtagtgtagacggggacttggatccgctggccctggctgcctggagatgctgggtagagcacgtagtatgcagcgtagacagcattcagagtccctcagccctggctgcccctacctctgccccttgcccctggccatggccctgggcgcacgcctggccctctctgagccacagctccctcccaccagggctggtgagaaaagtaaaccgagagtgctgtttcctgccaccctgctgggtgctcagcctccctccacccgcatcctctcgagtgggtagaatcccaactgggggccctctggcagggtccgggagctggcacacgagcaggcactctggctcggccatgcatccgtccatgggccactcgccgagacacgtggctctaaatggacacagtcattcaggaaatagcgcctcgcccaccgaatgccaggcgccactcagcaggctgctgtaactccgcaggctgcctcctgaattgccctccactttcaaccttgaccccaggttggcctttctggggactgtcccaagatcgagagacacacttcacagccaagccctcgtctgcagcctcggagctatgagatgttccagctccagggaaaaaactcaggaatcagaagtctggccagccccatcccactcctcttggctttaatgtaactcagaggcaccgatcctggctcttggggcagaattctccacattcctggtgtgtttccgttgaaccccaaaccgcaaacacatcctgacatctcatttcctcaatgtgccctggtggtgactcgggccaccttgccgggagctcgttttgagtcatacagagatttgtcgaaggaagggtttctcatctcagaagttggaggccgttcccaccaacctccctccctgcatctgtacaagaattgctggcggggctgctattccctgatgcttggatctgagctctcagtgactcgggaggcactggccaggggccctggacaaatctaagctcagttccttatgtcaccactgtcaacctcaggcacgggaaggcggctctcagtctctttcctcctctgtagagctgggctcttagcagctatcttggccgggctctatctcaaatggatggaatctgggctatgcctgacacatagtaggtgctcagtgaaggaatggtgcccattagtgagagagggagacagggctgggcatggtgatgtgcacccgtggtcccagctacttaggaggctgaggcagaaggatccctagaggccaggaggtcgagacagcaatgagctatgattgcaccgttgcactccagcctgggcaacagagcaagaccctgtccttaaaataataatagtaataataatttattgaactcctgacctcaggtgatccacccgcctcggccttccaaagtgctgagattacaagcatgagccactgtgcctggctgaataataatcactaaaaaattaatctaaacataatttctaggctgggtgcggtggctcatgcctgtaatcccagcactttgggaggccaaggcgggcagatcacctgaggtcaggattttgaaaccagcctggccaacatggcgaaaccctgtctctaatttaaaaaaaaaagaaaaaaaaaattagcccggtgtggtggtgcatgcctgtagtcccagctgctggggaggctgagaattgtttgaacccaggaggtggacgttgcagtgagttaagatcatgccactacacttcagcctaggcaacagagagagaccctgtctctaaataaataaatgagagagagagagaaaaaaaatccaaggaaacaagcccattcattctacttaattccgctggtctctgggaggcaggttgggggtggagaaattccatgtttttacagaatcctgacgtcaccagcaactgccccaccaggagctaacttcagcacgggcggagggagggtgtctgcccacgacctgaccttgaactgggcctttcttaaatgtaaatgtgcatctcctttggtgcttttttaagtgggagaggtccctgaaaggttgttgcctggaggaaaagttttggcaattaacttttattattgtttgcttgcttaaagaaactgggggcccagagcagtgagtggcttatgcctgtaatcccagcactctgggaagccgaggcgggcagatcacttgagcccaggacttccagaccagcctggccaacaaaaattagccaggcatggtggagtgcacctgtaatcccagctactcgggaggctgaggcagggggatcacttgaacccgggaggcagaggctgcagtgagctaatattgctccactgcactccaacctgctgggcgacagagtgagactgtctcaaaaaacaattgggatgttcatcaaagcactattcataacagccaaaaagtagaaacaacccaagtgtccattagagaatgaataagaaaactgtgatccatacatacaatggaatattattcagccatgaaaaggaatgaagcactgatccatgctacaatgtggatgagcccccaaaacattctgagtgagagaagccagacgcgaaagcccacatagtgtgagattccactgatacaaaatgcccagaacaggcaaatccagagagacaggaagcagatgagtggctgccaggggctgggggaggggaatggggagtggctgctgatggggacagggtctcctcttgggggatgcaaatgttctggaattagacagaggtgatggttgcacaacattgtgaatgcacgaaatgccactaccgtgtacacttcatggttagttttatgttatgtgaatttcagctcaattttaaggtgtaaaaaaagcaattgagaataagttgcttctgttgtaaaacgttactttttttttcagacggagtcttgctctgtcgcccacgctggagtgcagtggtgcaatctcggctaactgcaacctccgcctcccaggttcaggtgattctcctgcctcggcctccccagcagctggaattaccggcgcccgccaccactcccagctaatttttgtatttttagtagagacgggtttcactgtgttggccagaagggtctcaaatgcctgacctcaagtgatccacccaccttggcctcttaaaatgctgggattacaggcatgagccaccatgcgcagccacattactatttttaatacagttattttgtcaatataacataaagtttggaccgagtatccactgatgaatgaatggataaacaaaatgtggtctatccatctatccagacaatggaatagtattcagtttttaaaaagaaagagattatagggccgggcgcggtggctcacgcttgtaatcccaacactttgggaggccgaggcgggcggatcatgaggtcaggagttcgaaactagcctggccaacatggtgaaacccagtctatactaaaaatacaaaaattagctgggcgtggcggtgcgtgcctgtaatcccagctactcgggaggctgaggcaggagaattgtttgaacccaggaggcggaggttgcagtgagccgagatcacgccattacactccagcctgggcagcagtgcaagactacaattcaaaaaaaaaagaaaagaaaagaaaagaaaaagagaaagattctgacacatacatgctccaacaggaactatcctaagtgaaatacgccagacacaaaaagagaaatactgtatgagtccatgcatcagattcatagagacaggaagtagaatggtgggtgcgaggggctgggggaggaggaaatggggaatgagtatttagtgggggcagagtttcagttttacaagctgacaagagctctgctgcgtaacatgaatggactggggtgagccgtgagggctggagggccctcagacaagagaaaggatgacagttccaaggcttcaaacagatgctctgagagaaccagtcctcagaaaggctgagaatccctggaatttttcctgggctggaagggatctgctctatggcttaaaggtcttggccaagggcctgaagaaccacccatcttccagggcccaggcactccgactcctcaaatttaaatacaggcgctttctacgcatgagtgccaaaccatttccagtaagtctcattgtcagctataaaaataaccactgttgaagcagagacaagctcgtgatgcagccaggcagtgccacagagaggcaatggcatctgtccctgtcaaatggaaagtcccctggccaagcctctgaattcaagtgaacatcttggtcttggatgtgaccatctgaatggtggtcgagaaagtgcttggtccatagaaggcacccaggacactcgagcccccttctctcccatgaccttcgtacaatggcacggaatggagacgcagggctgggacttcccctccaccacaccggtttcctttacaatgagattccattcctataatgaggaataatgtagtagcttagttaatacagacagaactgcccctcagtcggttcttgggtagtggagctagaatatacaggccctgctctaaaagctcaaagcaatccctggacagtaaccatagctttaataatactcatctgggccgggtgcggtggctgaagcctggaatcccagcactttgggaggccgaagcgggcaaatcacaaggtcaggagttcgagaccagcctggccaacatagtgaaagcccatctctactaaaaatacaaaaaaattagctgggcttagtggcgggcacctgtaatcccagctgctcgggaggctgaggcaggagaattgcttgaacccgggaggcggaggttacatgagctgagatcgtgccactgcactacagcccaggtgacacagtgagactccatctaaaataataagaataatacccatctgaatgaataataacaaaaaccagtaccactggctaggaggcggaagtggggttatggggaattgctcaatgggtacagagtgtcaatttcacaaaatgagaaagttctagagatctgttgcagaatggtgtgaatatatttaacactgctgaaccacgcacttgaaagtggtttttttaaaaaaaaagtggttaaagtggagctggatgcagtggcatgcacctgtaggcccagttactccagaggccgaggcgggaggattgcttgagcctaggagtttgaatccagcccgggcaacatagtgacaacctgtctctaaaaaaataaaaaaagaataaaaatttctataaattaaaaataaatttaggccaggaatggtggctcacacctgtaaccccaacactttgggaggatcccttgagctcaggagtttgtgaccagcctgcacaaagtagtgagactctatctctagaaaacatacaaaaattagccaggcgtggtgctgcatgcctatagccccggctattcagaaggctgaaatgggaggatcacttgagcccggggtgcgaaggctgcagtgagccgagatcgcaccactgcactccagcctgggcaacagagtgagaccctgtctcaataaataaacacatacataaaataaaataaatgaataattttttttttcctgagacagagttttgctttttcagccagctggagtgcagtggtgcgatctcggctcactgcaagctccgcctcctgggttcacaccattctcctcagcctcccaagtagctgggactacaggtgcccgccaccacacccggctaattttttgtatttttagtagagatggggtttcaccgtgttagccaggatggtcttgatctcctgacctcatgatccacctgcctcggcctcccaaagtgctgggattacaggtgtgagccaccacacccggctgaataaatttttaaatggttaaaatggtaagtttcatgttttttatcataattaatattttttttttttgagacagagtcttgctctgtcacccaggctggagtgcagtggcacaatctttgctcactgcaacctgcacctcccaggttcaagcgattttcgttcctcagctcccaagcagttgggattacaggtgtgtgccaccacaccccactaattcttgtatttttagtagagacggggtttctccagattggccaggctggtctcaaacttctggcctcaagtgattctcctgcctaggccacccaaagtgctaggattacaggtgtgagccactgagcttggccataattaaaaatttttaattaaaaaaaaaaaaatccagccgggcgcggtggctcacgcctgtaataccagcactttgggaggccaaggcgggtggatcatgaggtcaggagatcgagaccatcctggctaacatggtgaaaccccgtctctactaaaaatacaaaaaattagccaggcatggtggcgggcacctgtagtcccagctactcaggaggctgaggcaggagaatggcgtgaacctgggaggcggagggagcttgcagtaagccgagatcacgccactgcactccagcctgggcaacagagtgagactccatctcaaacaaaacaaaacaaaacaaaaaaaccactactactgtttctactactttacttgaacatctagaatatgccctgagggatagctgttatacctccatttttttttttctagacggagtctcagtctgtcttgaccaggctggagtgcagtggtgtgatctcagctcactgtagcctccgcctcccaggttcagcaattctcccacctcagcctcctgagtaattgggattacagtcacccgccaccacatccagctaatttttgtatttttagtagagacagggtttcaccatgttggccagcctggtcttgaactcctgacctcaggtgatccacctgcctcggcctcccacggtactgggattacaggcatgagccactgtgcccggccaatgacctctattttatagatgaagaaaaatggggactccaagtagtgatttgagcaacccaaggtcacactctccaggggtgaagctgtcttcacaccaactctgacttaaggctgtgccttttccaagatgtttgttgcccctccatggcttcaacatcttctctggtctacctcaggggaagagaagccacaggtatcttgctccaggatctagaaccggaaaataaaccagggttctggtccaccatattgttctcttagaactaggatcctcatttcctttaaaaagtgtgtttacagttgaacaattgctacatcttgtcttgagtctttttttggctctcgtagtggaaattctgccctttgtccttagtacaaagaaataatgttcatcacagaccaggatctcaaagtccttgtttctggcctcagaaagcgttctctctcccaagtgaaggttaatataggaataacaatggaaagtcacagaattgctcgtttattaaactagtgtttcttgcaatggtgttttaaaagtttataagagatatattattgatatataacatattgatataattacacattgttgatatatttttgagacattatattaggggagttttttgttgtttttagagttggggtcttgctctgtcgcccaggctggagagcagtggtgccatcgtagctcacctcagcctcgaactcctggcctcaagtgatccttctgcctcagcctcccaaagtgctgggattacaggcatgaaccattgtgcccggcctgtacattagtgttatttgaactaggatttcccccttaactatgaaattaaggttatcaagagtgagcaaaatattttaaataaagatgaggctcataagataatgtttattcaatttttctttttttattatctgagatcctaaaatatgtgtctttttggagacttgaataatcatcttaagggcttttagagctagaaaggtcttcactgggccgggcgcagcggctcacacctgtaatcccagcactttgggaggccaaggcaggcagatcacttgagaccagcctgagaccagcctgagagcagtttgagaccagcctggccaacatggtgaaaccccgtctctaccaaaaatacaaaaattagccgggcatggtggtgggtgcttgtaatcccagctactcaggaggctgaggcaggagaatcacttgaacccgggaggcagaggttgcagtgagccaagactgtgccactgggtgacagagtgacactctgtctcaaaaaaaaaaaaaggaaaaaagaaaggtcttcactggttgtctggtccaacctccttggccaaataagaaaactgaggtgcactgaggttaggtccaaggtcatgaatagagagcacccctgcacgtcagtcagaaaggaaatcaggctgggcacagaggccacgcctgtaatcccagcactttgggaggctgagtcaggaggattgcttgaggtcaggagttccagaccagcatgggcaacatagagagacctcatctctatgaataatttttttttttttgaggcagtctcaccctgttgcccaggctggagtgcagtggtgcgatatcggctcactgcaacctttgcctcctgattcaagcgattctcctgcctcagcctcccaagtagctgggactacaggcacccgccaccatgcccagctcatttttttgtattttcagtagagaccgggtttcaccgtgttggtcaggctggtcttgaactcctgacctcacatgattcacccgcctcggcttcccaaaatgctgggattacaggtgtaagccaccatgcctggccaatttttaaaaagtagctgggcatggtggcacatgcctgtggttccagttactcaggaggctgaggtaggaggatggcctgagcccaggaggtcgaggctgcagtgagctatgatcacaccactgcactccagcctgggcaacagagcaagatcctatccccaaaacaaaacaaaaccaggaagcaaatcaaggagtgatatttaaagacccactcggctgggcgcagtggctcttgcctgcaatcccagcactttgtgaggctgaggtgggcagatcacctgaggtcaggtgttcgagaccagcctggccaacatggtgaaaccccatcttcactaaaaataaacaaaattagcccggcgtggtggtgggtgcctataatttcagctactcggggagctgaggcagaattgcttgaacctgggaggtggaggttgcagggagctgagatcacaccattgcaccccagcctaggcaccaagagcataactgtctcaaaataataataataataataataataatgataataataataatataataaaaataaagaccactcaacgtaaacacgactctacccaggcaagcccacatcacgtcatctctttggaataagcttgcgataaccatcatatttccatttccttttatatttttccaaaaacagctcatgatacaatttgtacaggtcctagtaactttggggaaaattttggaaaaaaaaaagtagcatgtttcaaaggaacttgatctgataagaggcagaaatattgactccattatttcaagaggcagtttctttgtttcccagacgcttcctgacagttttaaaaatagccttccacaactgttccaggatgagaatgtccttttacataaaatgggctttgaagatgtgatttcatttactcagaggaggctgtagatcattcgtcatccttttccaaaacatggcttggaccgggcaatgtgggcccttgaattccagttgaacaccagtccaaactgggttgttggatgcggagaagataaagggtacccacaaagaggacacggctcgttacaatctgggagacaaaacgcaatggggttgcagtcaaaagttgcctcttgcgaccaggtgtggtggctcacgcctgtaatcccagcacttcgggaggctgaggcaggtggatcacctgaggtcaggagttcgagaccagcctgggcaatatggcaaaactccatctctaccaaaaaatacagaaattacccgggcatggtggtatgtgcctgtagttccagctcaagaggctaaggcaggagaatcgcttgtacccaggatgtgaaggctgcagtgagctgagatcatgccactgcactccaggctggctgacagagcgagactctgcctctaaaagaaaaaaaaaaaaagttgcctctttcggatgggtgtgtcggctcacccctgtcatcccagcactttgggaggctgaggctggaggattgctttaggccaggagtttgagaccagcctgggcaacatagcgagaccccatctctacaaaaaaaaaatttaattacctgggcatggtggtgcacacctgtagtcccagctacttgggaggctgaggtgggaggatcacttgagcccaggaggttgaggatgcagtgaactatgatcgcaaccaccgcacttcagcctgggtgacagagtaaggccctttctctaaaaataaagaaacaaaaataaaatgaaagttgcctcttgtctgctgtattggaggtttctgtatctgctgattcaaccaaccctagatcgaaactacttgaaaaggggccgggggcggtggctcacgcttgtaatcccagcactttgggaggccaaggcgggtggatcacctgaggttgggagttcgagaccagcctggccaacacagtgaaaccccgtctctactaaaagtataaaaattagccaggcatggtggcgggtgcctgtaatcccagctacttgggaggccaaggcaggagaatcacttgaacccaggaggcagaggttacagtgagcggagattgcgccactgcactccagcctgggtgacaagagagagactctgtctcaaaaaaaaaaaaaagaggcagggcgcggtggctcacgcctctaatcccagcactttgggaggccaaggcaggcagatcacgaggtcaggagatcgagaccatcttggccaacatggtgaaaccccatctctactaaaatacaaaaaattagccgggcatggtggcaggtgcctgtaatcccagctatttgggaggctgaggcaggggaatcgcttgaacccaggaggtggaggttgcagtgagctgagatcgcgccactgcactccagcctggagacagagcaaggctccatctcaaaaaaaaaaaaaaaaaaaaagagagagagagagagaaagaaaccatttgaaaaaaaacaatcaaaagttgcctcttatgtgaaagatctgatggctaggaggggtcattgttcattttctcagacgtgaccttggcatcgagtatacgttagcatgtcagtcgccacacgtctcagtgacgtgcgcttcagggcacgtgggcgaaatggcatcctgactccaacttgctctaaagtgcttctccagagcaaaggaagacagccatgcggcaaaggtggaaaatctggatgacagttgacgctgggtgggggtgtttactgtccttttctcttcaactattatgtttggaaattttcatcatacatttgttccaattggatactctattcttcaggaaagggcgtgagtgtcctttgccgtggaagagactgccaatgggagaggggatggatttgtggatttgatgttgattatttacacagcaggggagtgtgtgtgtgtgtgtgtgtgtgtgtagcagggaaggaaggaaacaggatttgagactggcttctaactttttaaagggtctgaggacctctttaaaaatcagatggaggctgggcacagtggctcacacctgtcatcagcagcactttgggaggccgaagcgggagggtcacttggggccaggagttggagatcagcctggccaacatagtgagaccctgtttctataaaaataaaaataaaataaaaattaaaaaaaattagccagggccgggcacggtggctcatgcctgtaatcccagcactttgggaggctgaggtgggcagatcaagaggtcagtagatcgagaccatcctggctaacacggtgaaaccccgtctctactaaaaatacaaaaaaatttgctgggcgtggtggcgggcgcctgtagtcccagctactcaggaggctgaggcaggagaatggcgtgaacccgggaggcggagcttgcagtgagccgagatcgtgccactgccctccagactgggtgacagagcgagactccgtctcaaaaaaaaaaaaaaaaaaaaaaaaaaaaaaaattagccggatgtggtcagctactcaggaggctgaggcaggaggatcacttgagcccaggagttcaaggctgcagtgggctatgattgcgccatgcactccagcctgggtgagagagcgagacccccatctcttaaaaaaggggaaaaaaaaagataaaaagttatgaacactgcaaacccacatacaataaaaaacaaaccagggctgggtgcggtggctcatgcctgtaatcccagcactttgggagtctgaagcaggcgaatcacgaggtcaagagatcgagaccatcctagccaacatggtgaaacctcatctctaataaaaatacaaaaattagccaggcatggcggcgtgtgcctgtagtcccagctacttgggaggctgaggcaggagaatcacttgaacccaggaggtagaggttgcagtgagctgagatcacgccactgcactccagcctggtgacaaagcaagactccgattcaaaaaaaaaaaaaaaaaaaaaagaacaaaaacaaaaaaccagcaaatgtgcattcaggggttcactgctttccctaaaaacgtcccctcccctgggtaagagctcctaattcaatacatggttttccatttctaagatatcaagagccatcacctgcctcttctgggtacggtgaatatgcaaataagcagaagacaacaagaaactagaaaccctgaagttttctaagaaaccctcaattcttttctcaaatcagcaaaacgagcctccgcccctggctggcttcggagctctgggcaaatgactgcagggaatgagtctcagttttccctcaggaaaatgggctaacatccaccctcttcatttacaaggttgctttgagtttccaacaagataatggaagctgaatcgctgtgaaaattgtgaagtcccaaaccaaatggtgccaaagctgtgactaccctggagagaggtgactcagcgccttctccaaagggatctatcacggcagaagcacatggcttgggaccttcagattcactctggggttttcctgcaggaggaaggaagtattgggaattgcctccggccatgaccactttcaggaagctgctcgtttttgcagagaagattaggggcatctcagaggttacaaagcccacgaggccccaccaggccccaatccacaaagcaggcccattccatgggcaccaagaagacgtcccctcccaacaccctcatctccaggactgcagggacccctcgagggtctgtaacctggaaaagggggattaccaaaggtttggaatctttacattcgcccaaatccaccataaacttcagtttatggtttatagatgacccttgaacaacacaggtttgaactgggtgggttcagtcatatgtggattttctttgttttgagcccgagtctcactcttgttgcccaggctggagtgcagtggtgcgatctcagcccactgcaacctccgcctcccgggttcaagtgactctcctgcctcagcctccctaatagctaggattacaggcatctgccacgacacccagctaatttttgtatttttagtagagacggggttttaccatgttggccaggctggtctcgaactcctgacctcaggtgatccactcgcctcagcctcctgaagtgctggaattacaggcatgagccactgtgccctgcctgtatgtggattttcttccacctctgccaccccaagaccaacccttcctcctcctcctcctcgggttactcaatgggaagatgatgaggaagaagacctttatgatgatccacttccacttaatggatggccaatattttttctcttccttttcctgaggattttctttttttgtttttggagatggagtctcgctctgttgcccaggctagactgcagtggcacgatcttggctcactgcaacctctgcctcccaggttcaagcgatcctccttgtctcagcctcctgagtagctgggattacaggtgcctgtcaccacgcctggctaattttttgtatttttagtagagatggggtttcaccacattggccaggctggtctcgaattcctggcctcaagttatcctcccacctcggcctcccaaagtgctgggattacaggcatgagccactgctcctggccttttttttttttttttttttttttttgagacagagtcttgctctgtcaccaggttggagtgcagtggcacgatctcggctcattgcaacttctgcctcccgggttcaagccactctcctgcctcagcctcccgagtagctgggattacaggtgcccactaccatgcccagctaatttttgtatttttagtagagacggggtttcactgtgttggccaggatggtctcaatctcctgacctcttgatccacctgccttggcctcccaaagtgctgggattacaggcgttagccaccacgcccggccctgtattttcaatctcatgaattactgccctgagacgagtctatgtaacaaaatatctgaggctgaaaaactgctttttaaaaataaatctacctgaggccaggagtttgagactagcctggccaacatggcaaaaccccatctctactaaaaatacaaaaaattagccaggcatgttgcctaatgcctgtaattccagctacttgggaggctgagacaggagaattgcttgaacttgggaggtggaggctgcagcgagctgagatcacaccattgtactccagcttgggtgacaagagtgaaactctgtcccaaaataaaataaaataataaataaaaataaatctatgtccagtggatccaggtcaacaccagccttctaagtcatgttgatgacatggatctttgatgtgatttgatgtcaatacacttcatctctgtggtcttcctcccccaagtccagctccacatctagtcacgggaaaaacatcagacaaatcccagtggagggacattctacaaagcacctgaccagttctccttgtaactgtcatcaaaaacacacaacgtttgagaaactcacacagcccagagaattcttttttttttccttgagacaagagtctcactctgtcgcccaggctggagtgcagcggtgtgatctcggctcactgcaacctctgccccccgggttccagcgattctcctgcctcagcctcctgagtagctgggattacaagcgcctgccactgcgcccggctaatttttctatttttagtagagacggggttccacccagcccagagaattctaacgagatgtaaggtctgaatgtcatgggggatcctgggacagaaaaaggacattagggggaaaaacgaattttttttttttgacagggtcttactctgtggcccagactggagtgcagaggtgcgatcttggcccaccacaacctccacctcccaggttcaagcgattctcctgcgtcagtctcccgagtagctgggattacaggcatgctccactaccacccggctattttttgtgtatttttagtagagacggggtttcaccatgttggccaggctggtcttgaactcctgacctcaaatgatccacctgcctcggcctcccaaatggctgggattacaggtgtgagccaccgtgccctacctgcatttttttttttagacggtgtctttcttgtcgcctgggccagagtgcaatggcatgatattggctcactgcaactccacctcctgagtttcaagtgattctcctgcctcagcctctcgagtagctgggattacaagtgcgcaccaccacgcgcggctaatttttgtgttgtttttttttagtagagacagggtttcactatgttggccaggctggtccccaactcctgacctcaagtgatcccccccacctcggcctcccaaagtgctggaattacaggcatgagccaccgcactcagccaaaaaaacagagcaattctgaataaagtaaggactctagttaataataatgaatccgtattggttcattaattgggatgtaagtaatgtgtaatgtaagatgttaaaaataaggtaaactctctaaggggcttatgggaacccttcgtattttctttgcgatctttctgcaaatttaaaactggccaggcacagtggcacatgtctgtaatcccagccctttgggaggctgaagtgggaggatcacttgagcccggggaagtggaggttgcagtgagctgagatcacaccactgcactccaccctgggtgacagagctcagaccctgtttcaaaaaaaaattttttttaaggataaattgtctaaggggcttatgggaactctttgtatctttgtgatttttctgcaggtttaaaactgtcctaaaaaataaagttggttaaaacataaaaatgggcagggcttggtggctcacgcctgtaatcccagcactttgggatgctgagacaggagaattgtgtgagtcaaggagtttgagaccagcctgggcaacatggcaagatctcatctcttaaaaaaaaattttttttaaaagtaaaaacttaagatttaaagagcaatgttccacctggttgatctgcttcctgatacccatgcagggaaaacaatgtttacagagattaaagaagcttctcttgttttgtattaaaatattttatattaatcattcaaacttcattttatacaacgagtgcatacaccactgggggagtgtctgactgatgcgtgggagggcgggtggggatgtctgcagctatgagtagggaggaggcggggaagccctgggtgcttcctctcctcgactgaccgctgtgtgttcgtccccagaggaagagcgggaggcagtcagccccgggggggatggcacagtggagagacggacctgcagaagtggtggccaaggcctctgtaagggcttccccaggagatgtgacctttccaggtcttgcagccgagtctgctcaccctgaacaagcccccgagtcccggtccttggagtacggtggcgacggtgtgtgtgtgtatatatagacatctgcactgccccctctctggaacccgcccgtgccctgtcccgcctacacacggccctcgcctaggcggcaggcatgtcagccttgctgagcgcgatggccagttccaggtcctcctgctcctgccgccgcagccgcgccagcctctcctgttccgccttctcgctctcccgcttggcccacgccagctgctgctcctcattgccaaactgcaaaggaaaaacggagagtgggtgatgtggccctggggctgggacctgcaagctggagggaggcagggaatgcgtgggaggggtcagggtcctgcccaccgcccagcggagggtccgatgtgcaggggataagcatgtcttggctgggcccagtgggcgtgcgagcctgtctcaggccccccatctggaaagcagagtggacgggatgcatgtgattgagtgtgaccttaaccatgacctctgggcctcaaagaaaccagccaccccgccccacgcagagaagtgaggatgggcccttgacgctggtggccaagaggtgcaaagatggggaacttccagcgtgcatggctctaaagccccacggcgcagacaattctgcactctgggaatgtggtatttctacctccagccatgctccagagagctctgagaccctctgagggtcattttctttttctttttctttttttttttttgagatggagtctcgctctgtcgccaggctggagtgcaatggcgcgatctcggctcattgcaacattcacctcccaggttcaagggattctcttgcctcagccccctgagtagctgggattacaggcatgcgctaccatgcccagctaatttttgtatgtttcgtagagacggggtttcaccatgttggtcaggctggtcttgaactcctgaccttgtgatccacccgcctcagcctcccaaagtgctgggattacaggcgtgagccaccgcacccggctctgagggtcaatttctcccagaacactgacaaaaggtgtggcacttacactgccatttagtcaagtttttatccgtggggtgtttttctaaaatgttcagttaaaataaaaacttaaaaaagggagaaaaccatcttgatgctgagataggtgatttcaaacaactcaaagtactttagtcatgaaaagaaaagccacatcccacaagctcctcccccagggtgggtcccaatgtcccagacttccctgagaggtcactggcatcatcggccccctcaggaaagctgctgctgcttagggattcaaaggattcccttattaatgtctctctgcgatgcactgcctctgaccagctctctgctcaacactggagtaacaccaaagataacatgcgcagtggctcttccccaggcacccttgggagcagaaatatacaaacaatcccagaacgatccaggacccaaggacccaggctctcgaggagggccctgcagactaacccaggaaggtgggggaaagaagcacacaggaacactcacggcctctccaccacacgcagcactaggtctgcgtgacaacctgggggtgggcccgctgtcatctcatccctctgacagctggggacactgaggccagggaaggggtggctcacactctagactttttcccccccaggcctgtggggagcaggatactaggtgaaactgacagggaggatgcgtccctgcgaggttctgggtgtgaggctcagtgcccgaccttggggtagccaggatgaagcgtggggtgggataagccagactgaggaggggctcgtgggccccaggaaggagctgggatttccccgtggaggctccttgggcgagcgagttgggtgatcagattggcagcgtctggatatttcacggcttgatggtggcatgagcgggaagcaggagagaggagggccagatggcagggctggggggactgggcaaggtgcaggagcagataaatgcaaggaacctggttgggaggcagatgtggcagtgagggggatgcggggccctggaggcctccctctagctggcctcaggacccagatgggggacaggcggagtgtcagtatcaagaaaagatgtccctgggaggaagggctgagtcttgacttcttaaagaggcactgcccagctaaacacttgggggtctgatgagtctccaggtcggactccctccccgccattgtgtcactgccaggggcacagataagcatcccccccgccccagtttggggaattttccaacacctcatggggagaaaaacaaggaaaaaccaacaagtgcaggtggaaattattccatggtgctgctgacaacagtgggagggagacagtgcagctgacggggacctcaccctccaccagccttgaggacagggtgggtgggagctgacagtaatgttcgcctggatccaaatcaaagcctggaacgaccaagtaaccggcctgctgggtctgaaccacagccctctggccgcctttggccccactgagcccccgtgtcacagtgtcactgaagcgccttcccttgacgggtctgtgtttccaaatgaaaggtgtcagcaggaaagttcctggtgccttcagagtcgaccggttcaaggccagctcacgaatccactgtggagacttgcattggtgaggtctgtatgcacttaggaggcacgctgggctgtgaggcctgggagagctctcctgaaaggggactccgcagctccctctgtgtctgctgtcttagccctggacggggccaccttctagttctcgtatctgggtgggtcacacgggccagaatctggatgtctgtggccgatgcaaaaccaatagtggctgggaaacacactggctctgatttctgcttccctctggcattaccatggaaccgagacaccgtaggggcatgacaccaccctagccgaggcctgcccactcaggatggggttcattttcagaagcaaataagtggttcatttcagcagcctcttggaaatccgcagtttagacagctcggcacgctgggcgatgggatggccccgggaggcgcccggcacctgtcctcactggcgctccaaggtgtctgatggcacttccaccccaccatgtgcaggacatgcctagccacttcccattcattcatttaccgacaatgaaattgtatccaactccttcaataattcgaagcacggcctagctgatctggtatttgcactactcttaatgcgaacttccaaaagaaccgttccgctaacctagaaatgccacttcctaatacacacatttgcctgagacagaaaggcctgcttttaaagaaataccagagagggaagaggtttcccgggaacagccacacacgcaaataacccattgatggaaatttggggtttgtaaattagagggttctggagaggcaccgccggggcaccacctccacaagtgaggtgcgggtgacctgggcccccctgactgccagcatggactgggctgctcctgcacaggtaaaaacatgccctgaacagcagtctcagaacgtccacgctgaaagagtcacgctgccaatctgccgggcagtcagacagccctcttggcatttgctcagggaagtggaatcattcaaaccagaggaagcagctgtgccctcttctaagttagcacaaatagtcaagatccagtgaacccagaaaccaccagctgatcggctgagcccccgaatgccgtgaacatggagagacgtcatcttgagtccccagaggagagctggttatggatgattttagacaatgatacgacccaaggggacaaacaaaaacaattaagggtcctgtcttcactcaacccatcccttcagagtggctgaagtacactatctgatcatttcctctggaaaaaaactggggtatttgcagtgggaaaagtgattttaaacagaaaacaggccgggcacaggggctcatgcctgtaatcccaacactttgggagcctgaggcagaaggatcatttgagcccagagttcaaagaccagactgggtagtaaagtgagaccttgtctctatcagaacattttaaaattagccagatgtggtggtgcgcgcctgaggtcccagctacgtgggaggctgaggtgggacgattgcttgagcccaggaggtcaaggctgcagtgaagctgtgactgcaccactgcattctagcctgggcaacagagcgagactcatctccaaatatgtaaaaaccaaaaacttagggaaaaaaaaaaaaaaaacagaaaacaacagggctgcatccaggcctgggtggaatttgctttcccaccaggagatgagggtgataaaatggctggcgctattttaaaactgaagttaacaattgttctggaactaccagaaatgctaagccaaatgataccttgaaaccttgggtgttttttttttttttatgcttttcgaaaaaacgagccctttgcgggttggggtcacaggaaatagaattatgaatttcagaaagagaacagtcatttcttcaagctgccgttcaccccacttacctaactcttccctacccaagacagagtacctgagtcatgtgtgaagagttctgttttttttaaatcagcgtttaatatttttccaccagaaaataaatgaagggctattcaagaaactctagataaagcaggttttgtttctggcttttattaacaatgtcaccattttgtatagacccccagtgcgcatctagggtcaacaaaatcaaactcactgccgttgtaaaatatttataggtcaccaagagccagaaacaggtcagggtcttgggcgatttaaataagccacatgggccagtcacgtgtaaccccagtacttcaaggtgggaggatcgcttgaggccaggagttccagaccagcccaggcaacacagcaagaccctacctctacaaaaaaaaaaaattaaacattagccttgcgtggtgttgcacgcctgtcgtcccagctactcaggaggccaagacaggaggatcgcttgagcccaggaattcgaggttacaagtgagctctgatcgcgccaatgcagaccaggctgggcaacacagcgagaccctgtcactaaaataaataaattgacaaataagccataggatagctgtgcacggtagagattatcaagacggctcagaaacaaatcgggtgctttctgtgcattgacatggcagggctgtgttcaaagagccatcccaggagtcgaagcatctataaataacacatctcacacctaatgatgaaggaactaacaagcccaaaggaagaaagcgagggcatcacacatagtgaaaccaattctgggaagacaacacctgaagctttcagagaacaagattttcatgtatcaaggaagctgctaaaaactccttgaagcgacggcatgttacaatctggaatattttttcacacagagaaaaacaaagccaggctttcgaaatcccgagatttgcttccgaaaaggcacttaactttgctcaacagttttttggagctctttttgttttggctttcagagtggctgttctagactggatttcttttttcattggagctggtaactgaaatttaaaagctttaaaaaaaaaaaacttcaaattgctcttccctggcgcgatctgcctgaagtccttcaatttgcacttgtggcacaaaatgcatggggcgggactgtgagaacttgtgcacaaagggctttttggggacagcagaaccctaatgtaactttcgcaatcttcttttcatacttcggaagtgtttgacatcttggcttccaaaaaccagtgaacacaacagcctcggtgcgtcagaaataatacaatgaatctaccgtgaaggacagataggtcccgcctccctgctggaagaaaacgtgcccttatgatagagcatccaaactgcggctctttttttttttattgagaaactgtttttcttacagaagtggcagtgtagaataaataacgcgagggacagagagtgtgaggtaccaagaggctaaagaagctgggaggtttgcctttaaaaggagacaaaaatcccagggaagctgcaagcggaagggagtggggtggcccggaggcggaggactcaacttacagaggtgaagtctgcaaagcccgaggcagaggccttagaaggtttagctgcagaggaggggacaaatgggtcttttccactaaacgggtccccaaacccctttttactttggaacgggtcgccgctgtcagccccgagtggctggaatggatcgggggcctcgggaaagtctgcggaaccaagctggcttacaggtgtacttttacctggaaagtttaggagaaaaaaaaaaggagaaagaaagaaatatgagttactcacccggacagagcagaatgctggtgggcacaagcccggggcgcttctctgagaaaagcttgtaacttggctaacaggctggacgggggtaccctggggaatcccagttttaatcagctttatcccaggggcttaacgggttgtgaacaacacaggaaaaacacttcagatgactcccatacacaacgcacacagagcagctaaaacttgagttgtcctagaatagtttgcatgcaggtacgtttcaaacagattcattttagcatggcaacacatttattaacatactaatttaaaaaatcatggctgagcagaaaaatacactgcaagcttctaacagtaaaaaaaaaaaaaggcagaggggagagttacttgcaaatgaaaaggaggaattagtttcacaacgtggtatggttattcggtgtgttagttataagggtctgcacacagctctgccatgctgaggtttaagttcttttttttttttttttttttttttttttcagagacagagtcttgctctgtcacctgggctgaaatgcagtggtgcaatcatggcttattgcggccttggcctccagggctcaagcgatcctcccacctcagcctcctacaggcatgagccaccatgcgtggctaatttttgtatttttagtagagatgggattttgccatgttgcccaggctagcctcaaactcctgccctcaagtcatctgcccgcctcagcctcccaaagtgctgggattacaggcatgagccactgcacctggccttaagttcttttttagcccccacttctgtccctctggtgttggtggctccaaggggcagcgtttatctgggcctttctgggcttctgccaagcagggaactccaggatgcccggtcccagcaaggtatatcttgacagggaggtgagagagaagtgttcagaaatggaggaaaatgacactgtgtgggggacatggcctgaggatggtagcttttcccagtgcatcctgccaatgtaccagaacattccaccaagaagcagaggcctgttaagatctgcttggtgacgggaggtcccacctgacgggccttccagcatctgcagtttgcaggccagccgggctgactccatgctcctgacacccctctatctgcccaacggagtccctgggcattcaacgtggtccacgcagcaccccagactggaagctcaataatatgcaacacgattccggcgtgttaactctggaagtttcgaagctaatgtttagaaaaaaccaggaactgcctgtccctccagggttgaccttggatctctggctgcacctccagagagcaccctggctcccagccacacctgccccgcccaccacctgagcctgggacacctgccttcctcatccggtagaacgagcccacacaggccagcctcggtccctctccatgcccagatctaaagcctttccctctgttcccccagcagatcagccatcccaggcctcatttttgaggccccaggtgtccttgtgggctccggggctacagcccccatctgccacctttagctctgggcctcggcaagggaaagtgcctcctcccagctggcctccgtttccttatctgtgaagtggaaatgagaaggagggcgccaaacaaggtgacattcctggggtccaggagtctcctcccactcagtgtcctgcaccgccgtgcccagcataggccagtgagaacctggcccgtagcccccccttgcctgtagccctacttctggaaatggaaattcacttttctctcaaccggcagttctgggccagcataaggactgctgctttctttttgcatattcaaggaaaaacagtcttccttcccacggtttgcacagaaggactcggagacaaactcccctgcagcccacccttgcggcctgcctgtccgcctctgcccgtcccacagggttccaccggggtcgccgttgcatccttagctgacctctggccaccagctgcgggagatccttccagactccttgtctgtgtgagtccatctaagaggctcctcctcagggttggagggcgagctgtcctgggctctattaggactcacatggatgagaaagaggggaggtcgaggcctggtatcagtctcctcctgtggcctcaaatcaattcactgtcagacccaaggcccagttagcagagggggccctgcaatctggaaggggcctatctttgccaaaacttgtgggcaagccatgctggagacccttccctagaggggcagtgcccagcccacgcgggcaggacaggaatgtggcccctctccttccgacagcgcctgccctctcagggcagtccccacacccgagctttctaggtgtctccctttttctatccccagatgtccctcccaccttcagctctactgcggcctcctcctaccccgacctccccggggctgcagagagcagggtgatctggcccagcccgcagaccccgggctggttccgctggccttgaggaactgcctcacacccccaccttgagacggcctcccatgcagggccactcctggtcccaggcatgagccaatggtaagccaaggcctcgctgccaggtctcccggagttgccccgttccctctcctaagggacgggcaggcagctctggcgggcgggggtcaagtgaggcctgcccagcctcctgtgagccccaggctgtccactggagcagaaggggctccctagggctcctgagcaggatggagggtgggcgagggcccctcacctccaccctcccgtccctagaagcctcatctccctatcggccgcccaccagctcggctcccttccctgtgagccaaacccacccagcaaagtggcctcaacacaggtgggccccagcaccctgcccagactgcttgagggcttctcccgcttggggatgacaccccagtcttgtccaggtggcacctccttccccaggaacccccaaacccagggcttctttcctggctatgccttgtccctctgcctggaaggcactcccaactggaatgccatcacaggcagtggccttctcagggaagaaatggcagccccttccccatcatgcctgtgttcagctctgcagccaagccctggggctgggagtggccctggaagacggtgtggggcatggcggccacccccctcagcctgtttcttaatccaaacaaagggctgtgtccccccaacaattgttcatacgttcaagtcctaacccctgtgccttagaatataaccatacttgaagatagcatatttaaaggggtaactgagttaaaacgaagtcaaaggatcaatgactgtcttcactgaaagaacttaggacacagatctacacacagaacagcaatgtgaagatgcaccaggccaaggagaggtctcagaagaaaccaaccccactggcgccttgatcttggactttgagcctctagaactgcgggacaatccatgtctgctgtttaggctgagatagagcaagtgtgagcagggagccaccaaagccaccggcaggggcaccctgggggacagtgtgacagtgtcctgcaccccagcctgtgggtttgcaggggatagggacagtgacctcagccagtccctcgagcccctgcctgcttctgcccagcttctccctccacgggaaagccccccctcccccagggtccctcaccactctgcttcccgtggcactggcctctggcacggctgagggtcagctctgtgaaaagcgggcccagcataccacaaatgccagccaatactgccccatgtccctggtgccctccagcccagggctcggcacacagtgggcttcaggaggtcctggtgaaccaggtgccacctgttacagattccacgggtctccagggacctggggccctttggagcaacaccctggggagcgagaagggaataaaggcatctgcccttcctggtttgcaggaaacagcaatgttactgtgcatgcttgggtatttgatttttcctcgaatacctatgtgatatggatcaaatagcaagattctagcagaggaaacagttaagtgtttccaggggagaagctcaaagtcccaggacacggtgtagccccctgggacgggcagcaagtccagggtggacactgcttgatttctcgaagccgttcctgcagggagtgatcacctgaggcagatttgcaagaatgtggagggaggtgtaaagggaggacgccccagccaggcccccaagagcgactgccacggtacagaaggttcaaataaatcagtcatttttgagctgcttttcttcttcttttcaatgaagatcttcctcccttggtttggggggtttaaaaaaaagaaattggtttttgggaggagcggttaagaattctgcctgctaccatttcaagctgaggtttctgatgcgcaaagagatgttcagagagatgaaaagcttcgttcacaccaagaactgcctgtgcctggttttgctctgttgccgaaaccgttgttatttagaaatcatgactatggtaatatgaaaccagggcacatcaactgctggcctcttgttttcagaaggaacatcaacaacaacaacggtttttttctcagttgttagtgtttgtgctttggtaagagaggagattttggacctgacacgtgtgaggtcagccgagtgcccggtccagctctcgaccttgctaatgaccagacgctttgagcaaagaaagcccccggcatcactgtagggccacggccctcagcccaaacttcccacttttgctcagcgatttatttttagcggctgtatttttcaaaccttctaggtctagttcctgcttttatgtaaccacttctgctaactccttaatcgttttttccgattttgtgaggtatagcttatctcaaacgtgacaaagtaactttaatctgcctccaggccctgaagcaaaagctgccacgcgcacccacgccagggttttatacttttttatggctccagaaaacatgagtaaggagagagctttactgacgcgcatttcagaaaaggggatggaaatcatgaaaacaaaacccaaaaaagtgggtatagaaacatctgggaatgatggcatcaaaccaggtgccaggcatcatcctggcacctggttcgatgccatcaatcctagatatttgcagcgggaactaccggggaccacagcagacggcagtgaataaagacaaatgaaattaaagaccctcttgggtgtgctgactgcctaccgcagggagacttcattaacagggggcaagggatacaagactgaagaaaacacaaaatagaacttattttcaaaccacagcagtttcaacagttacccaagcggtgtaccgaaaccacacacaggactgactttagcaaaaacaatatgaaccaaatggtttaccacagtatgtgctgttaaaaaaaaaaaaaaaaaaaaaaaaaaaaacttggtggccggctccaccctgatagaaatttctttaattctcctatttctcaagcttcttctcgaggctgcgcacgcccctagcacccgggatcggggctgtgatggggctggctctgctgcactagcgttcttggtcagcaaagtttttcaaggttctgacttttctatcttgctttgcaggaagccctccgcttaaaagcatcctcaagagctgggtgcaaagcaaaaaaaaaaaaaaaaaaacccaaaaaacaacaaacaaacaaaaaattgaatagaaatatacaattgcaaaccataaaaacggtgaatgctataaaaaccttggaaaggaaactctcttggtttaaattttttgcttaggaggagcataaaaggttcaggtgaggtatggtctcaatcaatccgattaataaaaatattagtaataaacatgagagtgagagagagagagagtgtgtgtgtgtgtgtgtgtgtttgatcctggctaggttctgtttatacagttcagttcagtgctgtacttggaaaatgcagttctgcagatgagagatacatacaaaaacaaaaagaaaacaaaaaaatacaaaacaagggtttgtggtcagggaagctgcccaccttcgctattatcctatacaacacagaacgatcacacaactctcactcatcctacacaactgtggacacacatacacaaccatcattgatcctacacaatgggacacacacacacaagcatcactgatcctacacaacagtggacgcacacatacaaccatcattgatcctacacaacaggggacacacatgcacaagcatcattgatcctacacaacaggagatggctacacaactgtcattcatcctgcacaatatggacactcacacaactcccattcatcctacacaacagaggatgcccacacaattgtcattcatcctgcagaacacagacacccacacaactgtcattcaccctacacaacaggtgatcccacacatctctcgttcatcctgcacaacatgcacacccacacaactgttattcattccacacaacaggtggtgcccacacaaccatcattcaccctacacaacacaggcacccacctgtcattcaccctacacaacaggcgatctcacaaaaccatcattcaccctacataacacagacacccacctaactgtcattcaccctacacaacaggtgatcccacaaaaccatcattcaccctacacaacacagacacctatgcaactgtcattcaccctacacaacaggtgatcccacacaaccacaactgtcattcatcctacacaacacagatgcccatacaactgccaggtttctgagagtcacgctgcctaggagagcagtggcccgggcggggcaccactccagcagagctcatccaaggccactgacatgtcttattccaccctccccatcctgccagaaaaaaagcttagctgcggggagaggggagaaagaaaacagtataggttctaaaattcatcactgctcggggacttgtcttgaaagagtgcttttccccaacacacgtcaacgtcttcctctggctcccatctaagacacatgaggggagtttgttttttacaatgtgacacacgggaccacgtaagggacctgcaggctgggagtcctgcaggcaccagccccgcgcgcactctgccttagatcaaagctgtgtcaagcagcacagccccgggagataagaatctgaggtccctgcgatcgcagcgttgagattttccactaaaaatatttaccgaattttgagaaaatctgcttcatgcattgaagggaacaggatgaggtttggttctgaactgttgagaaaagctgaacaaatatttactacgagccactgctggccgctgtgttttcctgccctgtgaggtgtgtgaggtgggcagggggctgttgaacccaatggctgtggcctcatcttgccattaaaagaagaaagtggggaaaaggtgctgtgccttggggtcctcaaaaggcaaatatcatttgaagtgagaaataacaattttctagaggtcaccacaaaaggctcccatgacatttacataaaacctgccaggcaagggctgcaccagccctggaagaaaaaaaagtgtgtgtgtgtgtgtgtgtgtgtgtgtgtgtagggtggggtatgtgatttggaaatgaatttacaaatcacaagccagtcttcatgacaaaaataatacagactggcaggtgtcacaattctggcttctttgaaaattcgcatttgttctctggcgggcacctttgacataccctgcgtgaacacccctgggtgtcagccccatcctctggggggatttccagggagagatgctatctatgcatgagccaggcacggggagccctgacagggcaagggggcccagctttgttcctccctacggagtgtgccaatgtcgcagacgccacctctgcaaagggtaggaaggcgccttgcccacatgtaacaagatccctgagaacgccgtgcagcgagtctgaaagctggttaggggtcgtgcatgaaaggacccaaaagagcccctgggaggggagcaagtgaggcgcagagcccaccaggagctcccatggtgggggacacttttgctctctttatggccagattccccattgcccgagtgcatgtgatattttgcagttagcagtggcaggcaaggggcgcgctgactcagggctttgaataggagagatgaaagatgaggggccatgttcaccccgccagaaaagcagggaggcggtgcccagagctgcacccagagcccccttctgaggcgtctgccccagccctcacctccctcaggtgccaagcaaggggttgaggtgtcctggaggcaggtacacccgatgtccccagggcgatggctcccgtctgttcacacctatactcagatgctggggtgggagcccagccactctaggcctgcaccccaccctgcagccccccaggcctcagcatttgcaccccactgaacaccagatgataatcgagtcacacgacactccctggatccgcctctgggtacagtgtgcccaggaaggcaaatgcttctattttcaaactcagtggtctttacagaacagaaagtgctccaaacggcaatctgcctgcagtcagtttaaacatacaaggctgacattcctccctctcagagtgggaccgttccttggcaccgtcagcaggtcccacccagccctaagacagaccttccagagggctcagacggaagctctgaagcttccttgaacacagcagtgctgggggatggggggcgtgggcaggaaagagggactccacctggttggccgttttaggctccttgggaccccctccccatcctggctggcaggcaagtgccagaattttccaggccccttgagatggtggaaccacttgtcccattgtagaatttcacatgtacccaccggattatctctctgagatcatcgtgggaacgaaattgaagtagttaagttcaaggctgaggtgctaaccgcagggttcaaatggagatgccatttttaaagtggatcttgtgcaatcaacaaaaggttttgggacccacatgggcacatgatggggagaggtcactgagccctggtttcgatgttggcctggcatttcagagaagtgggagagctggcagcacttaggacctcagggcttcctcggtggctgcatcctgtgtggcacccccggcagggaggtcaagaactcacggccaccctgggtggatgccacacacaggtacgggaggggcttgtttgcaaggggaagaatgacttttgtcttcttcttttgttgagagagctgctcaaatcaaacaggacagccgctggttaaacttaggtaaaagctgttcgttagtgcaactgtggggagggggcgaaaagacatgctcatcaccatcacctatgcggctttgtttaggaggtgaaaaggtcattagcagtaataaaataatcattaaattggggagaggttaaaggtgactggctggttagcggtagaactgcgctggctggtgtcaccgggcgctgcaggcaggaaccgcaacgcagggccgcgctggcaggaagtggcaagggtggggccggtcgcaggatcccactatcgcagcagggctgaggcccaatcactgacacccacacagccgtttcctgcacttaaaaaaaaaatctgtttctctctttgcaaatcaacaacttttacctagaaactcttcagcggtgagctctgactgatcttgatctccggtccgttgcagaaaatataccattgtttacctgggggaggtgtgtgccacggctaactttaacctaactctaactgacaggtttcggcagcctgccgggtctgtgctgcatctgcctgaaagaaaccagtttcttctgcccaaaacagacacctgctggttatttaataccttgatacacctttcttgaaaagacctccaggcaagaagaacttagtgcccacaccaaagctccatgcatgccccaggagatggcccttggtggtccccagagtgcactttctggcttagatggagacagaactgagtatgtggccttgagggcagatggccaactgtgggctactcagctgtacgctgtgaccggaactctccctcgaggaacctctgcaggttcccaggtggaggggtccacctgtgactgtccaggtcaacacctgtctgcccgtgcacccacactgcatgccagccacaccaaatgtcaatttcacctcaattgacctttaaacaaaataagacaagcagctcccacggaatttgaaaactgcagcctctagaacacaagagatggcaccaaagccacacgtgactcagacccaaactcacatttggtcctgtatgagcgatgacccacagaggacgctggagccctctttgaagttcaactccctgcacgctttttttaacggaaaagatttccactaaactgtgacctcacagggagaaaagggcccaattaatgactcccagaatgtgtgcagccacctcagctgcccagcctgtctttcctggaaaaggtgcccatatggcagaagcctgcgtcccggtccctgtgccgcagggtggggatgggggctacagaccacatacagcacgtcaccgtgcaaggcgcttcacccacacacccacctgctaggcctgagtgggtcccatggtcaggcaggaaaactgaggctcagggaggttaagtgacccacccggggcctccctttcctccaatgtccagaaaccagcctgatcaagcagtcccctggattctagcagaattggctgcccagaggacagaaggaagcggcctcagttctcctgtcctggcctcacacatcagccatttcctggcacagaggcctagcagggttctagaaacctctgggtgccctgggatggacaaaccctggatgggagcatgggacatcagacatgttccatgtgccaggcggagagatgacagaaaagcttgttccttcattgtgatttccatgagtgcaggtgtcaacgctgtgtgcatgtttaagactgcccactggacagcctatgggtccttcagactttttgtcagtctgtctatctccaccagctcaaggctcgaccgccaggctcacagggggtcgcatttcaccttcctcctcactcagccacgctgggacccacgcatctcgcgcaaagccccagcatctgggaagccctggggtggccaggggaaggcggccgtcactgtgtgctggccgtgtggtctccctgagcagaaaaagcctggggtagcaagaaaggcagaaaggctttttttggtttgtttgtttgttttaagaaaacataaagtccagcagtttgaaaacgttggactttatgcttaaaaaaaaaaaaaaaaattcacagattagcttcactatcttctgtcttaaagaagccaagaaaacaagagatctgccttgtgtcttcctggcgaactttctgagcacgacttcacccgacactcatctgctgaccgctcttgcccataaccagaggcctcctgggctgcacgtgggtctgtgccgtgtggccaggaaccgggaagggaattgtacagagcccggctctgattcccttgaccagagagcaagggtagggcaagcatcttcctttgcaattccccaaagagccaaacacttctccccaacatgtgactcaccaaaggtcaaccactgggtcaactcagtgtttggactgttagaggttagtacggaatcacagcacaaataatgctgcaagctcaaacggcaaccaccacacggtctgtacctaccacccagcagcgagtacaatgcagaatttttctgttcagccattgcttctgggtaaaagaatcaaatgagaaatatttaggcctccacacagatctgcagttgctccggacttaaaatgctgcgcgtgcattggctgttttagagaatgttctgaagctcatggcttggttctcgttactcctgtcttggggcaggaggcaggtcactgggtgtagacctggccctgctgccaccttgctgtgtgaccttggggagcccccatgacctccctccccgcctttcctcttccaggaaatgggcatggcctggcctgtctccctcacgggtcttgctgggacctagtgagataagaactgttcaagcacttcctaagggcccatcaatgttaatatatttctgcagagcaccgagtggcacagcaaccatcaaccacagcagaacaaagatgcagtggcctgtgccacgagtaaaggagcccaggaccccctgggtctcaaattgtgcaacagctccctaaaaagcctgaaccctgaagccaggcccaaggaagtcacccaaactcccgttatcaaacgttctacttttaacaagcattcttttctgctttcgaagcccacagtacactaacagcagaagccaaggtggggtgggtaggcttgcagagggagacacgatgggaggtgataactgagggaaagttcaaaagcagacccagcgccgggtttaggtacgtggggaggcgggggtggcggtttccatgaaacactgaaaatgaagctttgcacctgtgagctgttgagtgggatggctcctcctcagggcccagcaaatacggcactgctcggcaagtgtgtgcacccatatgagaatacgtgcacatgtgtgtaaatgtgtgtacacgtatgtaagcacagagtgtgcatgcccgggtgtgtatgagcacacacgcacgcatatgtgtgtgcacgtttgcatgcatgcattatgcaatatctgtgtaatgctcacctgtattcatgtatatgttcacatgtgaatatgtgcatgtctcaatgaatgcatgcacatatataagcatggagggtgtgcatgcccagctgttatctatgagagcatgtgtgtgtgcaggcatgcacaatgcagtatgtgagtgcatgctgctcatctctatgcatgcatgtgtgtactgacaagagaatatgcacacatgtccacagatgcatataagcatggagagtgtgcacggaggggtgcatgggagagtgcgtgtgtgcctgcatatgcgtacatgcaggcacatgcgagaatactcatgtgatgcagtatgtatgtgaatgcatgctcacctgtatgcatgtgtgttcatgtgcaaacaggtgcatgcatgcatgtgtctgcaggcgtggaggatgtgtgtacacagggtacacatgtgcatgcaagagcatacacgtgtacgtgcacatacatgcataaaaatacatggccgcacgtgggaatgtgcacatgcatgtgtgccagctgtgtgcatgcattgtgattatgcatatatgtgtgtgtgtgtgtgtgtgtgtgtgtgcttctgctcccatcttttaggcagagtgaagaggcccactgccgttccatcaggaagccaacaaggatccctgaagagccactgcctctgtgtaaggcacaggtggcctcttgcagatggaagggagtccctttgttgttttgtttttcctcctgatggtaaatgtctttgatgtgtggcttacagaaatgatctctttacgcatctgtatctgctcaacagttcacagaaaatctgctctaaatccacacagcccatacttggtcatactttttctcctgactcatccacaagaaagccaacctgggcactgcgggctgggtccccatcctcctgagagaaggccatggccagcccaggggacaggaggagagaggcggtgttctaaaaataacttcccctatgttcacctctactgacaggtggccgaggtgcaggaccgagggtcactcgtaactagtgagctgggggcatgcggagcctgctaggtccattccaggacctgcgatgacacaggggctgcaaagtgaggccagtggcagattccaggggaggggcacgtgtaggcaggagggtgagcaccacttccctcgctggagctgatggaaagggctcgggggcatgccctatctagggaagacaggtaacagaaggcatgatcctgggagtgcgtgggtctcctgtggctgcccacaattcagggacagtgtggggaacagtctgcctggaggttagagaataggaggcgtcccagaccggggcacagatggaacaggcaatgaccgggtagataaatggatcagggagctgcagtgactccttctgccacttgaagcaatagctttctgtttgagagtctggccaactggccgccggcctaactctgtcatacgagagaaatcccacgtgtgagttaaagggcttcagaatcctcaggggaccctcgagggccaaggctaggagacattggcagcactggccatggggaagaggggcagggcctgtaggaagtcccctcctcagagctgtgcgttgagatgcctgggcaagctggggcagaggggagccccgagccatcctgcctcctcacatcagatgccaccaaggacaatctcccgctccctccactctcagtcctgaagcagctgggaagggactggaccaagcagcgactcctgccaccctcacccccaacaggccctccctgagcacggacagggagaaggacggaagagaaggggccagagtggccacagggctgccggccatgagtggctcctgaagtatagccagggcgtcggggtggcactgacatgctcaggcggaggccgcacgaagcgcccccagccacaaggggagctctaaggccaaggctttgtgcactccaatacagagccagaagcccaggggcccacaggacggggcgagggcgggcaggcaggaggcacacaccacgcacatacggcacttgcgtggacctgggcagctgggccggggggaccctcttgctccccacacagggtcccacggcatctgctgctactctgggctggtgagcagggaggccctggtcccccgccatccggcaccggtaggcggtggctgcgagagaagaaagcttactgaccgctgggcggtttaggccgtggaggagcaggtttcttcggaggcagagcaggagtgtcctgtttacttttaaaggggtcatctgagaatcctgcccctcccaaggaggaggtgaaagggccagaaggtgggggctgtaagagaggacatgaaagagaggcaaaaatagttgttaaaacaaaggtgacggatgtccactgaacagacgctcatgctccaagggccctggcaaggcctcctaccctctggactgcacaacatggccctgcttggacgtggggtctctttcaagccccatgctttcctccaccctcaacagcaggggccctctggcctgtgggtgatgagctgcccaacatagggtggcagagagcagtcccatacctccacgggcttctagcaccaagggcatccccagtcacacgaggcacactgggtctttcctgactccaggacttggcacatagggtcccttgggcctcctgcttacacttcagagacacgccccaccctcacctgtatgctggctgtggtgcttggcacatgccctggtgtgccgcctccccactgagctggccggtgtggtcactgccttcagttagtgatggacagctccaggtgctgggtcagctggcaccagactttcttcctccatgcctctgggctgcacatgcagcacctcaggtggaagtgcatcctcacatgcccggccacccgcactggtcagcatgcccacgccacctccactgggctctgaccacctctggcccggaccctcggtcagcctccatcacacccatccacatcctccaccccacacctgctgtctcaaacccaaatcggaccatatcctccagcttaaagagagagacagtcagagatagttataacaattggatagatgaatggatggtgggtgggcagatggatggaatggtagttggatgaatggatagacatatatgtggattaatggacgaatgaatggcgggtgggtggatggatggatggatgggcaggtagagacagggaggcgggtgggtggtagacagggaggcagatatgtggcgacgtcttgcaggtaggtaggtaggtaggcacttcctatagggaagctccaagctctcattaaggcatgcagggacttcatcgctgccccagctgcctgatttttcaggctcacctctgaagtcacccctcccctcacaatgcctccttagtccccagaacccactgaccccccagccgctgactcagcctcctgtttccaagtcctgcaacactcaggtctcctgctggggaactcggcccacctcgtccaccaggaacccctctccttgctcagagcctggctggaccccactgccgtcccccagagctctcccagggctctccctggggctgcttcctgccacccacgcctgcactgctcactgagccacagagacacgcttccaggcctctcccacctggagggcaagcacagtcctctccccggcacctgctgcctccaggcctgtgatgagcagatactaagcgccgccacctggggggatgcttgtccctcacttggagcgccggtgaggcacaggggagccagggtctccatcagccacagaagggccagcatatctcaggcgtctgagggaaggggctggggtgtcccaggagggagaaaatcactttctatgggcagaagaaggatgagtaaccactcttactaaaacagaaaataattaagtctgtaataaaatagaaaataactacatttttactaacagaggaaacacattgttacaaaaatgcaaaataactaggaaattataggacaaagagataacactgcgacaggaaacaaaaggaatgggcagaaataggggtaaaaatgatcatgtgttcctggccgggcgcactggctcacgcctgtaatcccagcactttgggaggccgaggcgggcagatcacgaggttaggagatcaagaccagcccagctaatacggtgaaaaaccccatctctactaaaaatacaaaaaattagccggtcgtggtggcgggcgcctgtagtcccaactactcgggaggctgaggcaggagaatggcgtgaacctgggaggcggagcttgcagtgagctgagatcccgccacagcagcactcctgggcaacagagcgagactccatctcaaaaaataaaaaaaattaaaaaagatcatgtgttcctccaagagcatagaagagaaagatcagagtggggcagaggtggagggaggggccgggggtctttaactttctccccagcagggaaggcctagagacagagaacaggtcaagagtacaaaggcacactcccagggtttccctcgagaatctgaatgcaacagattgcagatgtgggggaaaaggtctaccaccacgtccagcagacagtcttagaggtatggctgcctctgcctccagcatctagtcacaccgatgcagctgactaaggctccagcgtctagtcacactgacacggccatctaggccttcagtgtctagtcacacagacaaggccatctaaggctccagcgtttagtcacaccaatgcaaccatctaaggctccagcgtctagtcacacagacgtggccgtctaaggctacagtgtccagtcacaccagtgcagaggtctaaggctccagtatctagtcacacagatgtggccatctgaggctccagcatctagtcacacaaaagtggctgtctaagactgtagactagccacaccaatgcagccatctaaggctccagcacctagtcacacagacacggccatctaagactccagtgtctagtcacatagacgcggctgtctgaggctctagcttccagtcacaccaatgcagctgtctaaagctccagcatctagtcacactgatgcagccagctaaagctccagtgtctagtcacacagatgcggctgccaaaggctctggcatctggttacacagatgcggccgtctaaggctccggcatctagtcgcacagacgcagccatctaaggctccagcatctagtcacacagacgtggccgtgtaaggctccagcatctagtcacaccaaagcggccatctaaggctccagtgtctagttacagcaatgcagccatctaaggctccagcatctagccacacagacacggccacctaaggctctggcgtctaatcacacagacgtggtcatttaaggctctagcgtctagtcacacagacacagccgtctaagattttagtgtccagtcatgcagatgcagccgtctaggcttctagcgtttactcataccaatgcagccgtctaaggctctagtgtctagtcacacagacatggccctctaaggttccagggtctactcacacacacgcagccatctaaggctctagcgtccagtcacaccgacgtggccatctaaggctccagggtctagtcacacagacgcagccatctaaggctctagtcacactgacacagtcacactgacacatccagtcacactgacacagctatttgaggctctagcttccagtcacaccgatgcggtcgtctgaggctctggcatctagtcacacagatgcgactctctaggtctctacaatttagttgcacagacatggccgtttaggcctctggagtctagtcagagacgtggccacctgtgtctctggcagctagttatagagatgcagtcatctaggcctctagcatctagttacagagatgcatcgatctgggctatttgcgtcccgtcacagagatatggctgcctcggaccttgtgtagtcctagagtcgaggttgctcggcccagtcagagccacatcagagacagaacagggaggtggcccctctaagaggcagcctacccattccaggtccccccgataagggcagtggcaggtgcccccagggaggggaaggggccccaaaggctcctgcacagatgaccccaccagatcccttccctgggcttcacgccgccctctgaagctgcccaggcaggagacactcgctctgtgctgatcttctcacctaataataggcccagtgacctggcagggggtcccactgtcagcacctctgccttacacacaaggaaactgaggcacacaaaggaggcgcagcctgcccacatcacacagcaggtccacggcggatccagggctgccacatcgtctgcctcccaggctggggccaccagacgctgccctcagctgccgagggccaccccagtggtgggtccagggcctcgtcctgggcagactgtcctgcccaggctggaaccccaaccctgccacctactcaacaccctgtgccttggtttcttcatctgtaaaatggcaagagtgacagagctcggaaggctccggcaagaaggaaatgaggtgccatgtgacaggcatcagtccactcactggcactagataaagttggcacatggaccacacgacaatgatcacaccaagtacgaagctgcgattggaatctgggagtgcccccatctgctgccccagttgtccccaggcctgtccgagacatgaggggcagtgtcggcctgcagcttagctttaaaatgggccgtttagggtcggctgtttgggaaagaatgggggaaaaacactggcccgtctgtgggtgcttctgcgattcatggaacatgtccctgggcctagggcccgtgcgagtcccccgcggcctgggatggggagccaagcaggtctagatgggaagtggtgtgaccggctgggccttgtcctccctgggcatgtgctggcttctgggccacatctccagactcggagtggggcctcggttccagtggctgcagtgagcctttctaccctctgtgtcgcgcaataggacccgggcaataaaaccacactcagcctggacgtccaaagttgtaagacctggtgacacactcaaatcagagccgcctaaccctccaggctgaccggggacacctcgggccaagccggcttggcgcctcccatgtgtgtttaaacccacgaggccaattggcaactcgcgaggcgacaggctttcaataaacgcctggcactgcctccgcagtgaatcagatcactcctagctccagaatgcccgcgtcatttccgaatcccaattttcatgacttcaagtttcccaagaagcctccttggggactcaactctttcctactcgggcagcggcttcaaggaaaatctctatttttagaaaggtttcagtaaagctgtcaggggctctctgggctcggcaagagtgaagtgtgcttaaaataaaaggaagacagaaaaagctactatgaaaaccagctctaagagaaacacgtttgagttcaccagttgaagaactggttcaaaacagaagactgaatttgtaaacagcagccctaaatatcaatgcacagctttaaacaattgagaagttgctaaaaatgggctgacgactaacccagtatttcacagatggctttttttttttttcagggcagaagagggtgaaataagttggactcttgtttttattctcaaatgctccctggaaacatactttggggaatctgtttttaaagtgagcttatgtcacataggcttgatactgtctagaaaaatctcttcaggtgagggtggggcctcaactaagagtgcaggcccgaagagcctcccaaaggaaacttctagaatcaggctgtgggctgtgactctcctcagcaaagccacgcagaggtaaggtgcttcaattcagggacttacaaaagggcctccctgctctgctcagatggggaaaagttgatgatggtttttttttgttttttaaaaaaacaccttcttgccactttcatttcccttagcattttatttatatccacaatgttgttcttgaaaaacagataggtaaccaaaaaggaaaaacagagctgcaaggtcagggttgagctcagaatgcggctgtacaagtgtcatgaaggcagctgatggaacgctggaatcaaaacaagatagtattggagacccattttccacagctctgtccaactctgtcctggcccggcaccgccaataggaagtgagaccggctctgaaatcacagctgcatgtgtgtgaagagcccctggtttcagggcccaaggacaggcagagggcggtcattagatcccggccctagctcaggctctgctagctctccctccctctgctcacagtgagaggaggaagacagatccagcctcccaaaggaagaggagtccacttgcgacaaccagaaacgaccaggacgcctgagggactgctgccaccgtgtggccaacgttttctgctttcgggagatggtttcccgcctgcccaggagcctgtgcactgggccctaaatcttctgccagtcccaaaccgtgtcacagcgtggcatatgagggatggaggccttctccgtgtgctggaaggaggggggcgccatgccagggcctctgggctccctctgcccaggctcatctgtgtaaacacacaccctgcctcggtcagaagtgggatctgctgcgccgccagggcacgcacacacgcgtctttgaaaacctgaacagaatctcaagtgcttctcggaatctgtgttctgtgatcacaagttgcgaccgctgccaaccccaagatgctcagagactcatctgctccaccagctgagtgaacacggggcagccaagggagactgcccagtcacactggcacctggggcacctgggcatggggccggtggggccccgagggggcctcatgcctggggcacgcgtcttccaggtactcccggggctccctcccctcaccaccttcaggctgacagcagcgctcacagggactgggcccagctgctccaggggaccccccacaccggccaccccttaccacctgggccatgggctccaggaggggggctgtgttctgcttgtggctactgcctcttcccgcagcgtggataatgcctgggcctctgcaggtggaactcgtgaggaaagcaggcccctgcagccccccgaagacagagcccatctgcccctgcctgggggctgccgagaagggacagagtggacgcaggtgtcagggacgggacacacctcatctgctttccttcattcctgccaaagaaaaatgctcctcactcaaacagggaaacatacaactcacaaggaagcacaatggtgccgcagccctgtccttcccactcaccacagcccccatttccaactttccagcagtttcttccggaaggcacctcagtcgtaaggggcttctattgttgttttttgacttgtccattctggatgttccctgttgaattctctatgctaccttaaagatgagctccaaccacactgccagcgtctggagaagccctacagctgtctgggaccagagccacagtgagttcaggtcaccgtgtggtgagggccggacaccaacgggtccagtctggtaaccagcctcgctgctgtcctccttcaacagttcactcctcacctgtggatctgtctgcatttattcaaggaggccggccctcacttttcaacaccccttgagagttctgtcacatgggcgactctgaacactcgctggcccactttccctggacgcctcgcacctgcaggcctgctgcccatggccctctcgagacgcctgtgcccaacgccttctcaagtttctactcggccatggcaatgacttcaccgtctgagacctgatggtcgtcagacaccagtgggagccaggggagcccagggcacctatgccactgggaagggtcagggctcaccccacgggactgcagtgcattggatcacagccatggatgctttccagacctgaccttgtgttggaaaggtgccggggagatacatacgtgacatgaacaattacgcctggcagcccacaccatgacaagaggcacaaagacactagcagaggcgcgggggctccgtggaggggctttaccttggacatctggctgaagtcggcaaagccttcagcactattgaaggacccacttccgaagggatctaaggttccaaagggatctgcaatcggcaccaacaaagtcagagttacaggtctttaagagaacatgccttctggggtggaggggaaatgctagatggcccctgaaccaggagactcaggaaggctgcatttattcattagacacgtgtgtctgcatgaaggcctctcagcaaggcccccctgcccactctggcatggcaagacggtttctcactgtgacgaccactctgggagggccagcatcattcacggtcatcagaagagtgacaagttgccacagaggcgtggcccctgggtcccactgggtctcaatgggtcaggaggcgaggagcaactccagggcgacctgccacccacatgatttatacagggtggtgtctttggatagaggtttttgctgtgttttctcctctaacctggaagggatttgcctagagtactggatacactcgcctatgataccaaacactgctacccgccccacgcaagctgcaggaccaagcggggcctgttcccaaaagaaagggggtgtccacagatgctcccattgcataaaggctcgagcgtgcatctgcgagttctacactgtgagatgaggttccttcaaacacagaacccacaacataggccagtacctggggtcaaattctggatttcttttagggaaaaaacccaaagatacaaaccaaagatttataaggaggagtgagtaaacagtagttaatatcactggtgctattactgaattcctactgccaaaattcctttctggaaagatgccagcgcgtgcccaggaaggggagcagcagcgggtgcttgttttggcctaatgggctcaggccaggatctgggtgccactgactgatgacacaaacacagaggccacgctggctttgggagtgaaagtgttaactgcgggggagctctgctactgcccaaggaatagtcaggaagaaaaataagtcatgggtctcacctgatccttttgaggagacactggaggatgaaaagggatcactggattcaaaggggtcgagctaaatgaaaggagagaggaaagagtaaaaagcagttcgttggttccatcacccattcattcaaccagaccttcctgacgtcgatgtacaacatccagtgctgagccagagggaaagtggaatgattaaaactcaacccaggcagagtaaaatcccaacagatcaaccctcctgcagatagcacctatcaacctggacggaatatccccaaaattacaaatacaaaaagcagtggcctgaaggctgggaagtgaacaagacaggaagaagactttggaggagaatttgaatgtggcagaagaacatagcaggaggttgagtttccattccgccagctacagcaggaaggcacagtgagggtgcctaagattctggtagaatctgaccaccagaggatggagcccagagacaaccactcccaggggaaaggaaggggaatcgggatggaggggcagagatgcaaagatgcaagccctgaacttcatgatccactctcccccaagtctcaggctggcctctgcacacgcaagcctggggggactcgaggcagcctgtagctgaggccacaagaactgagctgggattggagcttctgccatctgctggtgagtgtctgcagtgtgagtggcaccaagttaactgcctgctgaaacaaatccattcctgctctttggagaaaacagactacagtctctacacagaacgctcaccatgtatcagatacatttctaaacatataaagaactggaaaaatgtgaccacctctcaccggaaaagacaatcagtgtagccaatctcaaaataacccagatggtggaactctgagacagggacaacgtaaaacggtgattataactgtgctgaatgaggaaaaggaaaatacacttaaaatgagtgaaaacacaggtgaccttagaagagaaatagaaaatatacgaaagaaacaaatgaaagttccggaactgaaaaagtgtatctacaataaaaacttcatcaccggggtcagtggatcacccaagatcaggagttcaagaccagcctggacaacatggcaaaaccctgtctctactaaaaatacaaaaattggccaggcgggcaaggcacagtagctcatgcctgtaatcccagcactgtgggggccaaggcaagtggatcacctgaggtcaggagtttgagaccagcctggtcaatatggtaaaacccatttctactaaaaatacaaaaaattagatgggcgtggtggtggatgcctgtaatcccagctacttgggaggccgaggcagaagaatcacttgaacccaggaggcagaggttgcagtgagccgagattatgccattgcactgcagcctgggcaacaagagtgaaactccgtttgaaaaataaataagccaggcttggtggtgcatgcctgtaatcccagctactcaggaggctaaggcagaagaatggcttgaacccaggaggtggaggttgcagtgagctgagatcatgccactgcactccagcctgggcgaaagagcgagactctgtctcaaacaaacaaaaaaaaaccccacttcattaggttagctaaataaccaagaataaaagaaagagtaagtgaagttgaaaacagagcagtagaaattactcaatctgaagaaaaaggagaaaaaagaatgaaaaataaataaataaatagagcctcaggaacctgtgggacaataacaaagggtctcatatccatgtaactggaatcccagaaagagaggggagagaaaattgggcagaaaaaacaaattaggagaactgacagctgaaagcttaccaaatttgttttgttgttttgagatgggagtctcactctgtcacccaggctggagcgcagtggtgcaatctcagctcactgcaacctctgactcccaggttcaagcgattctcctgcctcagcctcccaagtagctgggattacaagtgtgcaccaccacgcctggctaatttttgtattagtagagacggggtttcaccatgttggccaggctggtctcgaactcctggcctcaagtgatccgcccacctcagcctcccaaagtcctgggattataggaatgagccactgaaccggcaatgaaaacttatcaaatttgttgaaaagcataatttacagattcaagaagctgagcaaagcctaaacagtataaacaccaagaaaactacacccagaaacttcaaaaactactgaaaaccaaagataaagagagaatcttgaaagtagccagagaaaaaccacctattacatacaggataacaatgacctgaagaaatactcctctccaccgggcacggtggctcacgcctgtaatcccagcactttgggaggccaaggcaggcagatcacgaggtcagaagatcgagaccatcctggctaacatggtcaaaccccgtctctactaaaaatacaagaaattagctgggcatagtggcgggcgcctgtagtcccaactactcgagaggctgaggcaggagaatggcgtgaacccgggaggcggagcttgcagtgagctgagatcacgccactgcactccagcctgggcaacagagcaaactctgtctcaaaaaaacaaacaaacaaacaaacaaaaactcttctcattaaggacaatggaggctggaaggcagtggaaaaacacactaaacaaacaaacaaaaccccaacaacctacatcaaacacaatgtccttcaagaatgacaacaggcctggcacagtggctcatgcctgtaattctatcactttgggaggacgaggcgggcagatcacttgagttcagttcaggaggtcaagaccagcctggccaacatggtgaaactccatctgcattaaaaatacaaaaattaaccagaaatcgcttgaacttgggaggcggaggttggaaaaaaaaaaagaaaagaaaagaataatagctgggtgaagtgactcaagcctgtgatcccagcactttggaggggctgaggcaggaggattgcttgagcctaggagtttgagaccagcctggccaacatatggaaatcccatctctacaaaaaataaaacaatagctgggtgtggaggtacatgcctgtggtcccagcaacttgggaggatgaggtgggagaactgcttgagcccaggaggttgaggttgcagtaagccaagatcacaccactgcacttcagcctgggcaacagagtgagactctgtttcaaaactaaaaataaaaaaatgacaacacagtcgacctgagctataagaagtgctaaagaaagttctttaggctgaaggaaaatgataatggagggaaaaccaatcttcagtaacaaatgaagagtatcagaaatggtacatatttgggtaaaactaaatgactacttttttcctctttctttacaatacccacaatggattaatacaaaaattgtaacagtcttatggagtttctaatgtatttagatgtatgaaattcacatgacggctataacataagacatgctggctgcaagggtgggtggacaaatggacctacatggttgcaagttttctatattttacatgagataatacaatactaacctcaagtagactatgaaaagttaaagctgtacatgatatttcctaaagcaacctctaaacaatcattaaaagaggtatgattaaaataataaaaggccaatagacagaattcaaaaaaacattcaaacaattcaaaagaaagcaggaaacaaaacatgggataaaaagcaagcaaataataaaatagtagacttaaaccatatcaataattacattaaatgttaatggactaaacattacacttacaaggcagggacttctgactggattttaaaaaaaaaagcaagccccaacactatgctacttacaaaagacacctatcagttttaaagatccaggtaagttgaaagtaaatggttgaaaaatgatgtatcatgtagtgaataacatgaggagaatgaagtgattaaacagacttcaagacaaagaacatcaccagagatcaaatgggaatcttttataatgataaaaaggttgttgtgtcagaaagacacaacaatcataaacacctatgcacctgacaaagcttcaaaatacacaaagcaaaacttgatcaaattaaagtgcagtatgaacaattccacaatcataggagaatgtttaacgcctctctctcagacactggtaggactaaaaaacaaacaaacaagacacagataatctgaacactatgaggaacctcaacctcactgccatttgtagagcattacacccaacaactagatacacattcttctcaagtgtacatggtttgttcaccaacataggccacaaacaacaacccttgattaatgtgaaggtattgaaaacatacagaatatgttctcaaataacaaatttaattaaaaatcaataataatagtattataatatacctaggagaaaaagccaagtatctggaaatgaaacaacatacttttaagtaatccataagtgaacagaattcacaagggaaactggaaaatatctcaaaactgaatggcaatgaagagataaagtattcaaatatatgaaatacatgtaaagcagtgcttaagggaaatatgttgctttaaatttatacagatgctccttgacttaccatggggttacatcctgataaacccattgtaagttgaaaatattttaagttgaaaatgtacgtaatatcccaataaacccatcacaaagcaaaaaatcagaagtcaaaccaatgttaagtccagacactccttgacttatgatgggactgcatctcgataaaactattgtaaagtcaaaaaactgtaaattgaaccatcgtaagtcagggaccgccagtactagaaaatgaagtctaaaattaatgaatgaagcttggatcttaagatgttagaagagcaaagtaaccccaaataaataggagtaaggaaatggaaaaaaatagaaatagaaaagagaaaatcaatgaaatagaaaacaagcagtagagaaaaatgaagccaaaagctggttatgggaaaggtcaatgaaattggtaaacagatcaccaataccaggaatgctagggaaattctcactacaggtcttaaggacattaaaaaggggccaataagaaaatactgcaaatgagtctttgccttcaaggagcttcaagcgctaaagaccaaaaggtccacagggagtgagcgaggtgggcgccagggtagcaggagccctgagaaggagggtgagtgcccgtctctgagcaggccccgggcctgggttgcagcctagaaaacggaagaaggctatgaagcacgctcactccatcatgaacatcctctgctccatcaccgaggctgcttttttttttttttttggttttgaaatccaagttgacacctatttaacccaatctcttgggcataatatgcaaaatacccggtgtctgccacgcccggggatgggagtacaggtatgctggagttggaaactggagggtcagagttggctgatgctctcaggagacaccaggcaaggcagccgggctgagacgcctgcacttactcctgccgtgacgggagcacctaccaaacgtgactctaaggtccccaccagtgctgtgtgttacaaggaccgtgcagggtggccgggtccatgcgagcatgtggtgcttgtgtgatttagtcttttttgggagatgaaggggcagtgggggcagatgactagagttgaggggtaggaatggggatagagaaataagaactatgggtgacatcctccttgccctgatgtggggccactggactgctaactgcaccttggggctcacaggatgtcactgcagtgactaggccagtgagctccctcactcagcaggaatgaaatcagcctgggataccagctcccggagaacagacaccatggcccacactcgcaggcaccatgtacgctccacgaagggaagggggccttcgggaagcgccacccttaccacacagagcaggcacgcagctctcccgggcaacgtcccaccccactcaccttcgaaggtaaggaagggtttttcgtgaatggatccgaggtaaatgggtcattctttgtctgtttcttgaagaagtcgtcagtggcagagccacggaatgggtcactttctttgaaagggtcccctccaaatggatctagaaggaaaaatgccccataagtaaacattataccaagtgaaagaacccagacataaaagaacacatcacagaatgatgccgtttacatgaaattctagaaaggtaagaacgctagtgacggaaaacaggataatggtggccaggggaccctgaggagagggtggagggtgacaacaaaggggcctcaggaatgacagaagtgttctcaaattgcacacaaccgtgcatatttaatgaaactcatcttattacatagtaaaatgggtgaattttgttctgtgtaaattatgccactcaataaaattgactttaaaaataataatatcctggccaggcacaatggctcatgcctgtaatcccatcactttaggaggctgagataggaggatcacttgaggccaggagttcaagaccagcatgggcaacacagagaaaaataaaataaaaaattagccaggtgtggtggcacacgcctgtagtatcagctactaaggaggctgaggcagaaaggctgcttgagcccaggaggtcaaggctgcagtgagctataattgcgccactgcactccagcctaggcaatagagtaaaaccccatctctaaataaataaataaaatatcctgcaggagctggatataataataataataataataataataataataataataataataataaacaacgcaggtaaatccatagagacagaaaataggttggtgggtgccaggggttgcgggagggaatggggagtgactgctgattgggatggggtctccttttggggggatgagaatgttgtggaactagatgaaggtgatcattgcacaacactgtgagtgtgctcaataccactgaattggatgctttaaaacagtgacttttatgttacataaatttcacctgaaaaaaaataaatcggtcgggcatggtggctcacgcctgtcatcccagcactttgggagaccaaggtgggcagatcacctgaggtcaagagtgtgagacgagcctggctaacacggtgaaaccccgtctctactaaaaatacaaaaaattagccgggcgtggtagcgggcgcctgtagtcccagctacttgggaggctgaggcaggagaatggcgtgaacccgggaggcggagcttgcagtgagccgagatcgcgccactgcactccagcctgggcgacagagcgagactccgtctcaaaaaaaaaaaaaataaaaaataaataaataaataaataaataaaataaataaataaattagcaagcaatgtgatcccaccacactccagggtggggtgcgggcagtgactggacctggggaggggagccacctccagaagggaacgggaccgagaatgggtacaacatggatggacggccgtccttcccagttacatggctgccatccccggtgtatgtggacacaagtcccaccacatgcgacttctgagccaggactggacacagtctaaagaccggtccgggaaacactgaattttacctgttgaagttgtctgctgttctgcaaaggggtcattctggaacgggtcgcctggttggaagaggagagaaatgcttattagctctagggcacaggatgcgggccgggcccttggacacagccacccacctcccaagcctttcattgccttctactcctccagtgtagggagagaatgttagttccttctctactatccacctgccctcaaaaccttggcaaatcaaagagggggacctggaggaggcagctgtttctggctaggatgtttaagatgagaaggaaggtactgctggctgtcccacacagactggagttggggaagacacagagtgggctagaattcactcctctcttcccatgctgggtttcctttatcccatctgcctgccagctccctgggtaagaggacacaggaccctgggctgtccctcactttatcaccggccctgcagcaatgaggcggcggcacccctgggcttcaggggctgccagattcgcctctcagacccggcaggcttcaaacccaagctgaagctcaagctcccgctgccctctccccacctcagtgtttttctcaaaaatgtagagagccttcctcctggaaatactgttttgctctgaaacatggacagaaacttggaaatcttgtttctggaattcttagttattcttgactcaggtgtggctctggacagactcctaaaattatccagaccttaggtttatgtaggaatccatggttttccaggtactttcatgatcattactagctctgattattttatcaaccctgtgaggtgagcaaggaggaaatttattaacctgctgagggattaggaaactgaagtactgaagggttcaagggggctggccaagctgccttcaaatgtgggtcttgtggtgagcttggaacacttcccactgtatcttgatgccttggctctctggttaacagggtgagataagaagcttaaaaggcgttcctgctgggtgcggtgcctcacacctgtaatcccagcactttgtggggctgaggcgggtggattacctgaggtcaagagttcgagaccagactgggcaacacagtgaaaccccaactctactaaatatacaaaaattagccgggtgcggtgatgggcgctgaggcaggagaattgcttgaacccaggaggcggaggttgcagtgagccgagattgcgccactgcattccagcctggctgacagcaagagagcgagagttcgtctccaaaaaaaaaaaaaaaaaaggcattcctttccccctccatttcagattgtggcatgtccttacttttctagttgaagaaccactctaaattcgacataaaacacacagtctttcaatgagaaagtgggtagcaagtgagatacctttgaaggggtcagctcctttaaatgggtcagatttgaaggggtcttctgtctggaaaggatccggatgcaactcttgcgtgttgttgctaaataacaaggctttatttttgaaaggatcatcctacaattttgtgaagaaacaggacagggattttattatttctgagttaaagcaaagtacggaattccatacttaactcacatttccactttgagtagcatgaccctaaaaagaatgatttagccaggagttcgaggctggcctgggcaacatagcaaaatcccatctctataaaaacaaaaatttaaaaatgaggccaggcatggtggctcacgcctgtaatcccagcactttgggaggccaaagcaggtggatcacctgaggtcaggagttcaagaccagcctggccaacatggtgaaaacctgtctctactaaaaatacaaaaaattagctgggtgttgtgccgggcacctgtaatcccagctacttgggaggctgaggcaggagaactgcttgaacccaggaggtggaggttgcagtgagctgagattacgccattgcgctccagcctgggcgatagagtgagtctatctcaaaaaaaaaaaaaaaaaaatcaaggtgtggtggcgtgtacctataatcccagctacttgggaggttgactcaggagattgcctgaacccaggaggtggaggttacagtgagctatgattgtgccactgcactccagccacaacagtgcaagaccctgtatctttaaaaaaaaaaattaattaaagatcattgaagaagtatgaacttgagtgaataataatgtttaatactggttcattagttgtgacaaatgtactatatatgatgtgactaacaggaggaactgggtgtgggatatagaggaactatgcactatctttgcagtttttctttttctgaaacagggtctcactctgttgtccaggttggagtgcagttgcacactcatgggttactccagccttgaccatctgggctcaagtgatcctcccacgtcggtctcccgagtagccaggactataggcgcgcaccaccaagcctggctaatttttatattttttgtagaaatgaagtctctcactatgttgccagggctggttttgaactcctgagctcaactgatcctcccacctcagcctcccaacgtactgggattataggcatgagctaccgcacctggcctatctttgcaattttttcataaatctaaaaactattctaaaataaaagttcattaaaaaatcattgagtggaagcaactcaaatgtccatcgatgaatgaatggataaacggaaaaacaaaatttttttctaagtcagaaaaaaataatgaatttgaaatgtcatcaagaaaattgtaacgagccacacaacagaatctgattcagccttcaaaaggaagcaaattctgacacatgctccaacatggaagaaccttgaggagaggctgctgagtgaaatcacagtcacaaaacaacacacaaggtatgattccacttctatgagaaccctagagtcatcacattcacagtgacgaagtagaacagtggctgccaggggctgtgggtggggggatggggagtgggtatttcatggggatgaaaacgttctagagctgggttccacaacaatgtgaatatacctaacactactgaactgtacacttaaagacagtgaagatggtcaagtttatgtctatttttctttctttctttttttttttctgagacagagtttcactcttgtcatccaggctggagtgcagtggcgtgatctcggctcactgcaacctccacctcccgggttcaagtgattctcctgcctcagcctcctgagtagctgggattacaggcgtgcaccaccatgcccagctaatttttgtatttttagtagagatggggtttcaccatgttgggcaggccagtcttgatctcctgacctcaagtaatccacccccctcggcctcccaaagtgctgggattacaggcgtgagccaccgcgcccggctgtttgtctattttacctgaaagttaaacaatttttttttaatcaatgagtcagaaaaaaataataaacttggaaatgccatgaagaaaactgtaaagagccactcaacaacagcagcacaggcctcatttcagaggtgtgaccttcctcaatcatccttttctcggtgagtatgtacctaggtgggcatttgggaaaatggagttttcataccaagaaacatgctggttgtttctgtcctatgaggaaatgagtacttatgcagttagaattactagagcatacacaatgctttgcattttttttttaaagtgtgtatttctagaaacaaacaggttcatttaaacgagaagaaaaaatatttacttttgaagagcacatttttgtaatgggaagtagtctgaaaagggtgggtttgtcatatacatgggaacaatacagttggtttaaataaggactctgttttagttaataaagacacaccctcagtgaaaacatgaatgtttcactgtgatattaaaaaaacagcacaacaccctcattgaatttggcagacacactggcattcctgcgtaggactcacaaaccagtccagtattccaaccgaccaaaacaaaatcattaaaaagccggggcgtccacaaaaatagggacaatggtgtggggaaatgacatcaaaggtccaaaagaaagtttcctagcaaggctgccaccaccctggggcagccaacttaggggtgcaggacagttatgagaggtacagagttaagacaagccaccggtctgggctgtgaatgagtgtgaatcagcatgagtgccgcttcctcggcccccacttcaggagaatgcacccacatccctgccatctgatgaacatggaatggtttttcttacctgggaaagaatagctggagcctccgaccacagggttttcccaaggtggggaaaccaagccgggttcttagacaagttaagtacagatgtccacaagcactgcagctggagacagtgctgagtggacgtcaggtgctgacgaccacaagacacacacgcccagcaagcgtctgatgggggtctcggatgcagataaagatggagaagtcctactctaaagaagccaggaggcccacgtggaaaatctgcctttcacactgccccatggaaggaggaatgtatttgttccagaagaaagagaggaatcatgacctggataaagcagcgagttaagaatgccagcttgacctcagaatgaaagcttctatttagtttgtttttaaaggtaggatctcactacgttgcccaggctggagggcaatggctattcacaggtgcaatcccactactgagcagcgtgggagttttgacctgctccgcttctgaccagggcaggtttacctctccttaggcgactggtggtcccctgctcccagaaggtaccatactgatgactaacttagtgtagacacccaatcagcatagcacactacagcccagaactcccgggctcaaggatcctcctgcttcagcctcccaagtagctgggactacaggcactcgccaccatgcctggctctatttagtttttaattggcatttatttataaggtttttttttttcagtgttttcagtcgtcacttggaagactgccaagtaacagtgaacaatggcagagaagagactgaggttctgggaatgctggctgcaagccccctgcactgacagtcaggcctgcaatcactttctcaggagtcattggcctgaagccacaatcactccttccccttccaaggggaagcctgagaccccagcaggattcaggaggtcagggtaactaatagtggttttgattccattgcacagaatcagagtgggaaacgagatttccctgttacaaagataccatcaactctaccccttgcagaccacctactaaggagaacagacccatctgccaacttgggggacacgagtacagcagacaagggccaggatgaatgacacggcccttggcagagatgtaatatcttgaacaagttcagcaaccagtgtgaagttgtacccttcttaggaaatacacacggcaactctgaaagggggctgaagaagcttctgtgacattcccgccctttagaggagtgctgggcagcaggggtgtgctgggaatcagttctctcagaaaaaagccctggtttagagcttctgccaattcctgtggtgtaaacagtctcatcatggttgatttcaagtttccaagcaactagctcacaagttcctgttttttgctttttggggttttttttttttttttagagattgagtctcgctgtgtcacccaggctggagtgcagtggcacgcagctggcctcaagcaatcctcccacctcagcctcccaaaggactgggattacaggtgtgagccattgtgcccggccagttcctatttaataatcggttctggaaagtcaataaaaactggctccagcatgccactgggtctggatgtgacagatcaatcaacctttcttaatctgtcctcagtaaggcctaagtctgggatgatttattagcttctctccataagttgattggatggtgagcaagaggtcaatattctcataatcagatgatagacaagaaataaatatggctttaagaaccctgactttggcgggtgaggtggctcacgcctgtaatcccagcatttggggaggtcgaggcgggcagattgcctgaggtcaggagttcaagaccagcctgggcaacactgtgaaacctcgtctctactaaaaatacaaaaattagctgggcatggtggcacgtgcctgtaatctctgctactcgggaggctgaggcaggagaatcacttggacccgggaggcagaggttgcagtgagctgagattgtgccactgcactccagtctgggagacagagcgagactccgtctcaaaaaaaaaaaaacaaaaacaaaaaaaaaaaaaaacccctgacttttgagataaagtcacactgcgtgagcttcacatggaatttagtaacctgagtagaactgtccaaacataggaagttccagatgtaccactgtggatacactattctcagggacctaaaacccccaacttcgacccacaagggagaactaagacacctctctctcggctctgaagcagtcttgaagtgttcaggagtaaacaaaaatctctcttccaagtatttattaagaaatagaaacaagccagaaaaatgctttaaaaactgtatttgtacaacaggataaaaacagtttttctttcggatgccagttgcaagtttccatgtaacgtatcttaatctacattcccaaagtaattgtgtctcaggtaacctttgccctgcccaaaagatgaacaaaaataaccagaaaggtaaaaatctgtctttggagttgggggaatcactggccacttgcaaactgccacttcactgccaacttttatccaagaaaaccggtttctaaaaacctgcaaaagggacatttaagaggaagctgttccctgaacgaagactgagcaggacaagccaaaagcggtgccaggggacaatgccagatggggaaagtaggagccgggttgtgagacggaaacacacacgccaagaacagccagggagcaaagcgaggagttctggcttctcgtaactcatgaaggatgaatgctcatcgtttaaatttagacgataaagctgatgatgacgggcccgggggcggctatggaaaccacctcattacgagtccacgagaaaagagagtatgggaggaaagagggaggcggtgcacccagcgggggccagacacaagagacagatgagctcgccagcagtgccttcccagcagcccaggggacgcgtgtgcttccccataaatccttgggactgaggacttggctgctgagaaaagaaacacatcaagcattgaacataaagaggcaagtgtggtgtttagagagcacgagcgctcactcttattccagggaggaagaggaatccatgacgtacagaggcccaggagcagaagggctccagggaggagccctgggagagagggtggcagcacggagagagctgctggaggcagcagagcaccaaggaaacatccagacatgcgcggcccggcccatccgctcccggaacagcaccaagacgaaatgggaaactacatgtccccaggttcgaggctgcaggggcagactctggtgtgaacaggggggatgtgaccacctaaggaaaaggtcacacctgtcttggtatcaggggctcaagagctctcaaaaatgtaaggggccgacagtcccctgccccaggcctgatcacaactccagggtcatgaggtcagagtaaagtgcagaggtttttaaacataaccaaaatttcaggagaggccaattcttacttgaaagagcaacaccctggggcgctgcttgccattacttcctcatctttagcaacacatttgcttttcaaggtgttccttgtggaaacacacatacacatagacacatgcccctcagatgtcccctgccccctgattagtagaatgtggggtttccacaatgagcagaaactgatccaattttggttaagtttgagaagccctctgaacttgggtggttggcccaatgtaaatacttccgcagagatggagggcattcaaaacaggttctgaaaggatccaggcctatcttggactttgttctggaagccaggattcagcatggccacctgtgccaggctgcaaggcctggtgtgaacgcgcaaagtggcagcaaaaacaacagacagccgcctgcacttggctggaaccaacgttggccatgaacagatctggcgggtgggatgttctgctgtcacaccaggggaccagagccccatactgtaatacgtttattcaacctttaccatggctccaaaactgcccctctctgccagggagacgccttcgctcaggttggccaggtcggtcaggctggcaccatgggctccatcgagcacctggtcatactgctccaggctcctgtgggcctcctggcggctttcatgcagctgggaaagtttgctccttgcctgtgcaacaaagacatcatcagcattaagcagggtcaggaaaacatgtcagaaaagacgctttttttttttaaaacacagggtctcactctgtcacccagactggaatgtagtggagtgatcatagctcactgtagccttgagctcctgacctcaggagctcctcctgcctcagcctcctgagtagctgggactacaggtgcgtgtcaccacctatatttttgggcaacaaaccaagacccatctctgcaaaaaatacaaaaaaaattctgtattttttgtagagatggggtctcgctatgttgtccagtctggtcttgaactcctggcctcaagtgatcctcttgcctcagcctcctaaagtgctgggatgacaggtgtaaggcactgcactgcgcaaagcaacatatctttgctcctgacacccaactacaaactctaagggttagaagagaaaacactgaaagtaatcctacagatattaaccataaagcacaagaaagggtggtaaatctctgagcggtccatgcttgcgatcaactgtggcctataaactggctaatggagcacagacagagaccagttcaattggtaaaagaagtgtgcctggccactccgacacaggcgagggccagtgtcacaaccactgtgtagactggatgcccagggccaggacagaggccttcatctactgcccacaggagagcagggaagggcaacggctgcaggccacgagaagccagcgcccccccctggactgggaagagggtgggggcgtcccaggcagcttagagaatgggggtcctgcatggcgtgatgctccagggtggcgcctcctgaacacaccagtggctgtggaggatgacgtctgttctcttgcccaaggacaaagaagtcatctctctgactttgtccctcttgtttgtgtgaggaccaggctggaaagaaccccaagttctctccaaatgagccattaattaagtgttcccaccccaccccgcctactccttgaagatgctgtgtgctcaggaaaggaaagtgaactcctccaggccaatgccaacaaactctggaacatgccctggggagtccttggccctgcgcctccaggccagcaccacagcctcccaaaagagaccctcacgtaagtaacaagggtgagagcaaaggagttcagcagtggcagcctcggctcttggggctcgctggtccctggcatgtggcagggacccgactccgtgaagtacctggttgatttcgtcttgcgttgacttcagggacttgatgatggtttccagctggactcgcccagcctgaatgctctgctccagctgggtttcctcctgctgcaatcggttcagctccgacttggctcggttcagatcgtcttcctgggactttaagtcagattcctgagattggatttgcgttttcagtgatgagatctgaaatgagatgttaaaagatgttaaagagattcacagtgcaggatgaaatgggactccgagaaagaactcttagcccccatccccgaaacaagctaagccagggacgcagacacctaacccaggcccgacacctggcttccttacaggcctctttctacacccaaaatagagacacaaatgaaaaggcagatgggctcatcccactgtggctaacggaagatcactttggaataatgaggggcatgaccaagcacgaacaatctgtccatccccccagaggctgaacgtcatagagttttctgaggttgcagcctccgggatctgtgaggagcctcagagacacctgaggaggggacacaggcaccctggaactccctgtgttgtggggcacagccaggtggggtgtgttcagggcacaagttcgcagggaccaaggccattcacttatacaacctgacttctaggagtacaggggggtggccaggaagtcaagccacaggtgcttggacacttttccacgtggtgtttggaggaactctattgacccagtaggatgtctaagtgttgtgttcccaggtaacacgagctcaggggagtccttgggaagcccctgcctgtgcatagggcgctgccccggaggtggccgggacccaccatctgagtctcatcctggcacttctgccggacgtcgctcagcatgtctcggagcttggccttctgctggtccatctcgtccaggcggtcttgagcatcctgtttctgagcctcgagctcctgcaaactgcttgtttcccggtctaggtcattttgtaattcctagggaggagttgcaggggtttacgtgaggatgggaaaaatgaagcatgtccaagataacggggggcagcctgggccagaagtccaggggaagcctccgaaaccacccactgtgaccgtgctcagggccagcattccgtgcacacccacggccaatgtgtgcctcttgggctggaggcccagggccactgtctcaccagctccctcagcaggtatttcccgatggcctaacagaggccaggtgcgagagaaggggctgggtccctgtgagaaaaaggccccagctcccggatgacatgcagctgtggctgcggaggggaacatcacccaaacgcaaataaacgtggacaagtggcaccaagggggtcacagggaaactacagtcacaccttgtgggcagggaagatgcccacaaaagcagcatttaggatggggccaacaggtgagcaggtgccaggcaggtgaagagccagggacagagcctggcggagggaaccacagggaccccagggtcggggggtgtcgcactccagctagagcaaaagggaatgggtggaggcatcagaggctgcaccccacaggccacgccaaggagactgcgctgggctctgtggtggggagcccggtgggatgtgtgagtgtgggaggcgggacatcatgattctgtttctgaagctctctctgaccccgtgggatggatccagatggtcagcccgaggctccaatgccccatgattccacttccaagaaaagcatcctggaagcatacagcgtgtgcagaggtatacaacgtctatgacagcaaaatccgtaaacaatgcagatgtccatgaggtgctggctggaaggttccagcacagcccacactgtgggacgctccttggccatggaacgggatggcgccgtgtgctttgccttacagtgggacatgagcacactgcatttgtgcgaacgggaaggggagggtatgtgtggtatgcatcaacctttctggaaggccccctccaggagctcatgaacagcacctccggggatggggacacccaagaagagggcagaggcttctcacctcctgattttcaaccacgcaaatgcattatctgtctttaagataaataaccaaagctgaaatagcacaacgggcattgtgacaagcctcctccctccagctgccatgtggagcgtggtgcaaggggccatcaggacgcaggaactgcaggggcctcgggtggggtccagggagaggcagcagcagctggggcctgagtgaggtggtggtcgtgagaatggagaggaggggtgggtttgcggggagccatggctgggtggtggggctgagtccgagagccagcctgggctgctggggtggctggtgccctgagataacaaaaccagaggtggcccagggtctcccctctcctcactatggggacaaaaacatcctggtgcttccctgcctcgataggcaaatcatgcctcaggaagctggggtctccgttccccagtctccctgcccctggcctttcacttgagggctggatctggaggggacaatcagggtcacttatggacatgttcgacaggaaactcaggagaaagactccagtgagtgtgccaggaagggaagatgctggaaacataaagtcaggcgtgtcagcatcaaggtggtatttaaacacgtgggaatgggtgaggtgtccagtggggggcacagagagagcctgaggtagcccaatgctccgagcgatgctcccaccagggacggaagcctctagagcctcctaagtctaaccctggccccatcaccgggtaacgctggcagcaactccctggtgtcctgggcctcagggttctagttagcgccacactggctccttccaggccacggcccatggatccaggacactaggggctccaacacctttggcctgcccagagaagttccctcctttacctcctcctcaaaccaaagatgccaaaatgtgtacatcacatccttcatgcacagagcagagaatatttgcccagaagaggcatgacaggaggacaagagggaactcactggccacatgccgtgtactgaatgtctgttgttgaaattctcacccccaagatgatggtattaggtgtggggcctctaggaggtgattaggtacagcccttgtgagtgggattagtggccttataaaagaggcccctgagagctgcctcgatctttccactgagggaggacacagcaagaaggtgctgcctatgaaccaggaagtgggtcctcaccagacgctgaatctgcaggccccttgatcttggacttcccagcctcctgaactgtgagcagtaaacttctgttgtttataagcctcccagtgcatggtgtgctgttatggcaagccaaatggactaagacacacatgccatgtcagcgtctgcagtgacaaaggtgctcagggtacctcaccacttctctaagagggttctcacagtctcaacccctcctcagaagctcctgccctactcactcttggctctcccttccctttcttctccccactccccagcatttttttttcttttgagacagaatctcactctaacacccaggctggagtgcagcggtgcagtctcagctcactgcaacctctgcctcctgggttcaagggattctcgtgcctcagtctcccgagtagctgggactacaggtgcacgccaccacgcccagttgcgtgatttttttgtttctgtgtttttgtatttttagtatagactgggtttcaccatgttggccaggctggtcttgaactcctggcctcaagtgatccgccagactcagtctcccaaagtgctgggattataggtgtgagccaccatgcctggccttcttttccccttcttgattcttgctttctcccttcttgatatataaaatcaataaagctgaaatacacaattgtttaaaccttgctgggtaattttttgcacatagtttctcccccatttaggaacctgagctgcagtttccttcagggcagtctccgtcttcccccttcattgaaaaatgtcattgctccgtcaggccacagcgcagccaacccctgtgacgtgacaactcctggattcccctagacactagtggagaccctgggccagaaggggtggctgctgatgggacagagactgtgtctccaaacccctgaactgaggcattaagtctaagaagtttgggggtgataacacagaataactgaaacagagttagttgtgggagctggggatgtgggtggccacatctaaggggagtgatggataagggaagggaagatgggaagagcgttaggccggatggggtagctctggacaccaggtaacaacagtgtggaactgaaggaacctggacctcattccgtaatggagaaggagccatcagaaagtcccagagggacaaagacccaccagctcgaggttaggaaggggagctcagagcaaaaagaagacaaaaataaccccaacagtccacggagtccacacaatccctgtcagaatcccagctggcttctttgcagaaacagacaagctgattccaaaattcatatggggccaggcacggtagctcacgcctgtaatgccagcacttttggaggccaaggcaagcagatcatctgaggtcaggagtttgagaccagcctggctaacatggtgaaacccagtaaaatacaaatttgtaaaaatacaaatttttacaaaattttgtaaaaatacaaaaattagctgggtgtgggggcacgcatctgcattctcagctactcgggaggctgaggcaggacaatcacttgaacccaggaggtagtggttgcagtgagccgagattgcgccactgcactccagcctgagtgacagtgagactccgtctcaaaaaaaaaaaaaaatcacatggaaacacatgggacccagaatagccatgacaaccctgacagagaagaaaaagatggaggatgcccatttcctgatttcaaaacttttacagggctgcagtaatcaagtcagtgatgtagtggcatgaggagaggcagataggtcaatgggatagagctgagggtccaaaaataaatgcacagctatagtcaactcatccttgacaaggatgctagggccattcaacgggggaaagaagaggctcttcaacaaatggcactggcccagcatggtggctcacacctgtaatcccaacactttgagaggccagagtgggaagatccctagaggccaggtgtttgagatgagcctgagcaatacagcgagaccctgtctcttaacaaaaaaaaattgtttttgaattagctaggtgtggcagtgcacaccctgtagtcctagctactcaggaagctgatgcaggaggatcccttgagcccaggattttgaggctgcagtgaactagaatcataccactgcactccagcctcggcaacagagcgagactgtctctaaaaacaaattttttaaagtaaaataataaaaacaatggtgccatgacaactagatgtccacatgcaaaacaatgacattgcatccctgccttatgctatatacaaaaattaactagaaatggatcaaagacctacatggaaaagcgaaaactataaaactcttagaagaaaacacagggatacatcatgtgacctgagatttggtaatgggttctcagctatgacaccaaaagcaacagcagcaaaaaaaggataaaccagacttcaccaacattaacaacttgtgcttcaaaagacaccatcaagaatgtggaaagacaatccagagtggactctcagtggatgctgagaaggtatttgcaagtcacatatctgacaaggacttctacctagaaatgataaagaattcttcaaattcagctataggccaggcgcagtggctcccgcctgtaatcccagcactttgggaggccaaggtgggaggatcacctgaggtcaggagtttgagaccagcctggccaacatggtgaaaccctgtctctactaaaaacacaaaaattagctgtgtgtggtggtgcacacctataatcccagctacttgggaggctaaggcaggagaatcacttgaacctgggaggcggaggttgcagtgagctgagatcgcaccactgcactccagcctgggccacagagtgagactctgtctcaaaaaaaaaaaaaaaaaaaaaaaaaatcagctataaaaagaacccaattaaccaggtgtagtggcacatgcctgtaatcccagctactcgggaagccgaggcacgaaaatcatttgaacccaggaggcggaggctgcagtgagctgagattgcacccttgtgctccagcctaggcaacagagtgagactccgtctcaaaaaaaaaaaaaaatgcaatttaaaaatcggcaagaaaaaaattttttcaatataaaagggcaaggaatcggaatgatttttctccaatgactacatacaaatggctaataagcacatggaaagatacttgacgtcgctagggaagcatgagggacatgccaatgaaatccacaatgaggcagtgctccacacccaccacgacggctagaaggaaaaacgggaaatgggtaagtgttggtgaggctgtgcagagctggcaccctagtacactgcttatgggaatgtaaaatggtacagccactttgaaaaacagtctggcagctcctcaacagttaccatgtggcccagcaaattcactcccaggtatacacttgagataaaggcaaacaggtgttcacacaaaaacttgcagacaaatgttcctagcaacaatatttgcaaagccaaaacatctatcaatgagggatggatgagtaaaatgtggcccatcgtggcttggcatggtggctcatgcctgtaatcccagcactctgggaggccgaggcaggcagattgctttgagtccaggagtttgagaccaacctggacaacacagtgagaccttgtcgctgcaaaaaaaaattaaaaattagccaagcatggtggtgcatgcctgtagtcccagctactcgagaagctgaggtgggaggatcacctgagtctgggaggcagaagttgcagtgaaccaaggttgtgtcactgtactccagcctgggcaatggagtgagacactgcctcttaaaacaaaaaatgtgctccatccacacaatggaatattattctgccataaaaaggaattcaacgctaatatatgctacaatatggatgaccctcaaaaacatgatgctgagtggaagaagccaggcacaaaaggtcatgtgttgtatgattccactgacaggaaatgtccggaactccaggtacctgagataaatgcaaacaggtgttcgcacgaaaacctgcagacaaatgttcctagcaacattattcacaacagccaaaaagtgggaaaacccaaatattccccgatgggaggaacagatgaaggaaatgtgccccattgtggctgggtacaaatccatacacacagaaaaaagatgagtagttgccaggggctggagaaaggggagaatgggaagtaactgcttaatggggatgaggtttccttttgggttaatggaaagttagtgtcaaactcttccactcactgaaagagaacagttaacgatgaatctttcagaaagtaaccttccatttactgttcagggctagatgtttttatgggcctactggcgcctacgggagaaacaatcaggttctaactcgatagagtgatggttaatcaacacggtgattatgcgaaacaccactgaaatgtacactttaatacagcacatttgacattaattacatagccatccttcagattggtattaaaatttgcagatgctcaagtgtgacataaaacggttcagtgtttgcatataacctacacatgtcccctaccctagcaccaccccatattacttattcatttatttttgaggcagggtctcactctgttgcccagggtggagtgcagtagtgcaatcacagctcactactgccttaaactcctgggctcaagtgattctcccacctcagcctcctgagtaactgggactacagacacatgccactacacccggcttttgcaaatatttttgtagaaacagggtcccactgtgttgcccaggctggtctcaaactcctgggctcaagcgatcctccggcctcggcctcccaaagtgctgggattacaggtgtgagccactacagccagcctcgtatactttaaatcatctctaggttatttataatacctaatataatgtaaatgctatgtaaatagttatcatattgtattgtttcatcaatttggattattttttatttttttatttttttaatctgtggttggttagatccaaagatgcagaacccttggatacagagggccaacttgtctcaattttagaaaaagagaagccaccgtctatggttataagcaactttaaaaactttagcctgtaattccagcactttgggaggctgaggcaggcagatcacgaggtcaggagattaagaccatcctagccaacatggtgaaaccccatctctactaaaatacaaaaaattagccaggcatggtggtgcgtgcctgtaatcccaactacttgggaggctgagacaggggaatcgcttgaacccaggaggcggaaattgcagtgagctgagatcgtgccactgcactccagcctggcaacagagcaagactccatttttaaaaaaaaagaaaaaaaaatcttcactctcgccaggcttggtggcttacacctataatcctaacactttgagaagccaagacaggagaatcatttgagctcaagagtctgagaccccatctctatttggaaaaatatatatatatatatttttaaaaacttcttcttctccgagaaaacaccgaatggcggatgacaccggtgcagcggggggtggggggggggggggtgtcagaggccctgggatgggcaaccacagtaacttccacggaggtttcagcagtggcatctggggctggggtcgcggccgtggacagcaccggagccgggaccaaggccacggagcttgcagaggcaaggccgaggataaggagtggatgcccatcaccaagctgggccgcctggtcaaggacatgaagatcaagtccctggaggagagctatctcttctcccgcccatcaaggaatctgagatcattgacttttgcctggggggctctctcaaggatgaggttttgaagattatgccagtgcagaaacagacccgcgccggccagtgcaccaggttcaaggcgtttgttgctatcggggactacaatggccacatcggtctgggtattaagtgctccaaggaggcggccactgccatccgcagggccatcatactggccaagctctccattgtccccgtgtgcagaggctactgggggaacaagatcagcaaaccccacattgtcccttgcaaggtgacaggccactgcaactctgtgctggtgtaactcatccccacgcccaggggcactggcattgtctcagcacctgtgtccaagaagctgctcatgatggctagtatcaatgactgctacacctcagccaggggctgcactgccatcctgggcaacttcgacaaggccacctttgatgccatctctaagacctacagctacctgactcccaacctctggaaggagactgtattcaccaagtctccctatcaggagttcactgaccaccttgtcaagacctacaccagagtctccatgcagagcacccaggctccagctgtggctacaacatagggtttttatacaagaaaaataaagtgaattcagcctgaaaaaaaaaaaaacaaaaacttcattctgcagcccccaagagctcatgtttccatccagggcagacccctgcccttccccaccaccagccagggagggaagttttcctgaactacatttagcacaaagtagatgtaaccaaaacgaacgagacccttacctgcacctcgctggttttctgtctgattgcctcttccttttctcgaatgtcttgttccagtgaatatttctctctgaatgtttaaaaatatttcatgaaaacaagagtgaataataagcctccaccccttcccaaggcctgattctgttcacccccacaaaagcccctctgtgtgctggcagaagtctaagaatgagacccagcgactgctcgccctgtacagtcccttccccgtcaactgtaggtaggacctgtgaccatgggagggatcgctcccaatgtaaccaccctctaaaagcagcgcgctttctccacctggttgcccaagtggaagttagagatgtcccaagtgtgataaggacccagagcgcccttgctgactttgaaggtggaggggccacgtgagggggaacaggggcagtgtccaggagcatggagtggccctggctgacctcagaaaggaaaaagagacctcggacccccagccgcagggaaatggattctgccaacacctgaatgagcctagaaacagattcttcccctagagcctccaacaagagcccagcccagccgacgccttgacctcagcctgtgacaccctggacagcccaggacagcctgtctgaactactacttttttttttttgagacagagtctcgctctgtcacccaggctggagtgcagtggcgcaatctcagctcactgcatcctccgcctccccagttcaagcgattctcctgcctcagcctccctagtagctgggactacaggcacgtgccaccacgcccagctaatttttgtattttcagtagagacggggtttcgctgtgttggccaggatagtcttgatctcctgacctagtgatccgcccgcctcagcctcccaaagtactggaattataggcgtgagccaacacgcctggcctttttttggttttgtttttttttttttttgagacaggctcttgctctgtcacccaggctggactgcagtggcacgatcatagctcactgcatccttgacttcctgggctcaagcaatcctcccaccttagcctcctgagtagctaggaccacaggtgtgccccaccaggcctggctaattttttattttttgtagccgaggtctcaatatatggcccaggctggtctggacctcctgggctcaaccgatcctcttgccttggcctcccaaagcacttggattacagtcatgagccacagcacccagccttcttttatttttaaactgagatagaattcgtgcatgtatttcctagcactgctgtaacaaatcaccaactgggtggcttggaacaggaaaaattgattataggtgtgagccacaaggcccagggtttagtgcccttataagaaggaccccagagagcttcctttgctccttttgccctgtgaggacacggcaagaaggtgactctccaggaatcagcaaatgggtcctcagcagacccgatctgccggtatctggaggttggactttgcagcctccagaactgtgcgaaatgtctgatgtttcagtcacccattcagagtggtttgttatagcagtatgaatggactaagaccctcctcttgtgcccaaagaggctgcctcagggacaggaacaccatgtgtctaacagaccctgcctcctgcccagggacccaggacttgtgcaacaataaggccctctcagggacatgtcgccagacacacagtaagtgatcattggaatattcatttccacaagcccagaaacttacaatacaaagtgctctttaaactgaaggacctgacatgcccttgctggcttatggcagtgtgaaatcataagaggaaagctcagcccacactccccgaatcaagggccactctcagagccacctgctcaaggggccactgcaggccccagcctcctacagatgggcactctgcacacaccagcctgtcacctccacattggggaaacaaggcttctggctgtctgaggccacactggggtgattcacgccccagcgtcccttcctagaccctgacccttgcacgacaggggctccctccatccttggcctgcccggtcctgattctcaggcctgcccaggctctaggatgctggccctgcatcctcaagacaccctcagccttgtcaggctgcacatccttgctgatcgccagtttggataacacggcccccaggagctgagacagaacaggaaccatctgctgcactgaacatgaagtgggatgcctgactcaggccgtggctcaggttttctaaccagccacccaccttgatcccctccaagacctaacctgcctttgctcatcagggctctgctaacagcacaaaaccaaggccagaggagctgatagaatactgcacctgttaatatgacccccggggatcccccagctaggaccaggatccatcctccctgggaaagtcaaagccctttccattttcagccaagtaaacaatctctttcccacagagggcaaagcacctttgggcccttctgcatggtgccccgtcatcacaagagtccaccctgtcctagaatcgactggaaaaaagatgctggctggcacagtggctcacgcctgtaatcccagcactttgggaggccaaggccagaggatcacttgagctcaggagttcgagaccagcctgggcaacatggcgaaaccccatctctacaaaaaatataaaaaaattagccaggcatggtggcatgcacctgtactctcagcttcctgggagggtgagtgggaagatcacttgagcccaggaggcagaggctgcagtgagctgagatcacaccactgcactccagcctaggtgacagaatgagactctgtctcaaattaaaaaaaaaaaaaaaaaatctagccagcatggtggtgcgtcctagctactcgggaggctgaggtgggaggattgcttaagcctaggaaacagatgctacagtgagccatgatcacaccactacgctccagcttgggtgacagagcgagaccctgtctgaaaaacaaacaacaaaaaaggatgtcattcttgaagaggatccagaggggaatacaggaagtgactgcatttctttataccagactctaaaagtacagacagcccatccaaagccctcgtttacacatgaggaaactaaggcactaggcaagaaggggagccacagacctggaggccccttcacaccttcagctgctgggtcctaagcccgctcctcgccatctgagacccaattgccctagctgtcaaggataacaaggccttcctagcactggggaggggctgatgcctggggctactgagctgcgacctgcctgagaccacaaagctgccacaggctctgcccatgacctgcctgggacaacacagctgccacaggctgtgcccatgacctgcctgggaccacacagctgccacgggctctgcccacgacctgcctgggaccacacagctgccacaggctctgcccacgacctgcctgggaccacacagctgccacccacaggctctggtcaagacctgcctgagaccacacagatgctacgggctctggctgaggctgattcaaatggaagatgtcattcttcaagccccttgagccagtttaggacctcagaagctgtatcttttccttccttctgaataaacctgtgatgagcaaacttccaggtgagcctctgatatttccgataacaacctgggagagttcgtgtaacatctggatgtggagggaagggccgtttccaacatacctttgtaactgggcaatctcttgactgatgtcatcaagctccttcacgccagtaaactccccggagccgagagagcctgaactgtcctagaattgaattcagaggcgagatctctaattagcaacctgacatcacctgacaggaggcaccagcagttctcgggcccagggataaaattgtccctttagtacacagggtgaggtagcaaaagtgtcagccccctgcctggggaaatacctgggcagccaagccaccctcccgggggcccctgttgaggaaggcagggaccacaggcagcacccgccaccgtgggctcatgtgtgccaccagtgccacctggtggcaggcggtgggaagggatgtcaatacccccagggcatgaccagcaccactcaccgggccgggcgtgcctctctccgaaggcgggaccatgtccggcgagaggacttgaggagggtcgatgcctttactgaccttctgctgaatgaaatacatagctaacgcgaattggtctttgcttaacttccccgtttgcctcgtatcggccagggccctgggagaaacgtggggatgctaattacacatcacaggcgccgactcagcctgaacccaagtcaccgatcccttgcttttcaaaaacgacagcgacgaaaacaacggcagggcgtggtggcaagccccagctccttccctacttcacatctccttcccaggaagtggcccaggggttccccgctcccagtgtcccccaccctaggagggctgtcagggctgaagaaccccaagcccctgacctgggctgaggagccgaccccctgggaaaacctcactagggctgagatgcagctgcctcttcctttggcttatctcgtgcgtggggcaggctctgatgctgcaggcatggagtagaccagcccttccgtggaaatgggtgctgagaccaagcattgtccctgtagctctgggtcatctgaatggccccggctactggccttcaatggggatgacagcagcactttggggtgtcatcatgatgaagaaagaatcagcaacgactctctttccttgttatgaacggaacgtttatgtccccccagattcctatgtccaaatcctatccctcaatgggatggtgttgggaggtggggcctctgggaggtgatgaggtcatgagggtggagcctcaggagtgggattagtgcccttataaaagaggccccagaaggctctctctgctccttttgccatgtgaggacacggcaagcaggtggccgtctacaaactaggcagtgagccctcaccagacactggatctgctggtgcctggatcacagacttccaccccccagagccgtgagaaatgtctgtttctaagccactctgtctatggcactttgtcacagcagcccaatggtctaaaacactcctcttgtgcccaaatgaggctgccacaggggcatggccacaatgcacaggacagtcccccacaactaagcgtcccctgcccacatagctcttggatgtcctgaaagatgggccaaggcagcatctgaatagcagcacacagtggtcctgtggagctgaggtgagaggctccgcgacactcacaatcaaggagccagccagggccgggtgcaatggctcatgcctgtgttctcaacactttgggagctgaggcgggcagatcacctgaggtcaggagttcgagaccagcttggccaacatggggaaatcccgcctctactaaaaatacaaaaattagccgggcatggtggcgcgcgcctgtaatcccagctgctcaggaggctgaggcacgagaatcacttgaacccaggaggcagaggtttcagtgagccaagattgcgccaatgcgctccagcctgggcaacagtgagtctctgtctcaaaaaaaaaaaataaaaaaatgaggagccaaccaggaagggaagggacccttgtggagtaaggacaaggcctttggcatctatgaaaaatgtcttccttcacccatgctgccctctcaacgagggacctcgtttcccacctcccgtgtagctgcggcagaagccattacaacagaagtttccccttttaccaaaagagagctgggaccgttctaacagacttatttatacccaaatgcagtccgtgaacagagctgcggagaatgagcagatctcaaagaacattgctgataaatgcctagttatccccacagttcgaggccctgacgatttcatactgccactgtctctccccagtctgcccctgcgggccccagcctgctcgtgggctgcagctgcctctccactcccgccccttctctgctcctgccatctctcaaggagtgtgggctccaaggcccacctgtggaaggttctgagagaaagaaggagaagcaagcttaggggtggctcagtcagcggccatccggctctgacaccacatcctgctctgctgacccgtacggtggcagccatcgcagggaaaaagcctctgtcttcatgctccccctcctcccagtccctcctggtgtgtcatctacattgggccatgccccgccccagccactcgcagacacatctagacttcttttctcatggttattcaagagcctgatcatcctttccttcccctttgctgcccgcatggaatgacctctgagttccttcttttgatccaggtggattagtgatttcctgtgtcatttccatgtcattacatcatgtgtcaattgcagcatgcattataaattactttccctctactgacccctagacatgacagtcagggtgtcagggcgctaaccaggaactgtatgtgtgttggtttcagagtcataaaggggacactgtgttttgttggtttctaaaagggacactggatctgaggcagctgagacccactgtccctagccagttggaggcggcttggccatttgggtgatgactctgcgacagctagttctcaggctcccacctcacagtgtggtcatctgtgaattaccactaaggacagtcatttcccccaagccactaagtaacatcctgaatttcactgctctacttggaggtatttgcctctcgagaattatccagcaattctttccttttgatagctcccaagtgaagccttctctaaggccacaaggctctgagcaacaagctcaaaagtgacttcagccctggccagtggcaagaggagtgccccagccctatgaagtcggctgtgtccagccctgggggaaagaggggttgaggccgactcctcgactgggctctgaggcactgacagggtctccttgtgctcaccctcccgccaggagccaaagcactggcctttccagagcagggcctcctgcccccgccctcaccctgccaggccactctgctagaggctccaaggccctgctgcccgcacctcccggaggcggctgtgacaaagtccaggcctcctgttagagccagcatcacagccagcaagaatagggcccagctgtgtaagcaaatggcctgggagcacttaagacggaccagaggcccttcctactgaaagacagtgaactgaccgtcacggagcgcgggcttcgagccttggcacgtgcaccttgctcagcctctgtcaggccagggagaataaaggacgccagacacagcggaagcctgtgacaggctggagggggccccctgaccaccaccctccacagtcttcacccacaggccccctggagccacccacagccacaactgccacctgtccggccttaccatatgtgtgctagaaggttctgggtgaggcccgagtgcatgaagatctccttcacctcctggccactcacgtagccatccaggtccaggtcggtcttcaggaatatctcatcaaatcgcatcttgtctgccacgggcaccacccagttcactgttggctgaaacagtttttggcaaaacagttaatctggaagctttttatgacccccagacacatgctttttgatgatggggcgattaaagcacttccatgcacatttggcatcaaactctcctcacttccatgagccaagagggcagatgtgatccttgttctgtaactggcaaaactgaggctgagacaggttgaggctggctctgtgaagctcacccagatgccagtctgcacctctctccaccccatcacccgctctccttgtccatccaccctgccacccagggtgtgagggaggctgtgatcttcaggggatgggttcaagcatgccaggaaagaccctcccgagcacccacttggaaggaccgtccctggagaaccggcccggccacatgccagcctccctggtcctcccactcctcagcccgcaaaggctgccctacaggcagccaaagtgtcctgtcccaggactctgaagaccacccttctatgtccctgccccactcctgagacaacaaagatacccccaaggtgtgagtacacacacgtcactgacaggtaacaaatgagacaccaccatccaagagggccaccacccacgaggccccaccaacattcatgcagccccaaccccaccagggcagatggagccacgagcccagtgcagctcaaagttcacagccctggggctgggtcacccgctgcacgtgcgacccctctcgccaccagctcacagttaacttgagagaggcaaacgccatcatgggtcaaccagggcccggtcacctcctggttcagaggcattgaggcccctcaggcactcaggggcaggccccttccgtggcctactccacctgcattaccgcgggccttcaatacacccaccacgccacagttcacggcatctgtgtcctgaactctagacgtgcttttcctcttccctttttttttaaatatttacacaaatcactccttttaaacaatctcataatagcaatgagaataaacacctgattgaattatctagatgatgagggagtggagagaaaaaggacaggcaaatgtggctggagggatcgattgttccttctccacgcagcaactgtacagaaaagccactccactcctcaccttcaatgaacgccatgatgcctgaaactgccactcaaagtcattcctctcagttatgaaaggatttcttaggctgggtgcagtggctcacacctataatcccagcactttgggaggctgaggtgggtggatcacctgaggccaggagtttgagaccagattggccaacatggtgaaaccccctctctactaaaaacacgaaaaattagccaggtgtggtggtaggcacctgtgatcccagctactcaggaggctgaggcaggagaattgcttgaacctgggaggcagaagttgcagggagctgagattgtgccactgcactccagcctgggcgacagagcaagactccgtctcggggaaaaaaaaaggggggggggatttctcaaagagttctcacagtgttgacaacccgaagatgtccataggattgaggagaagggactcatggtcaagactgggaaacaatggttaaactcgtttactcttcatgaacgagtctcctgtgatgtccaaatctaacaggctcctgataccaactcagggaaatcagaaagcaagcttgggaaacaagggataccatgtgacccagatcagcttagttcaggggtttcacgtagcaagtatgtgtgatgaagtacagcaaggacttgatcaaacaatttatcaaaatccatggagctaggccaggcacagtgctcatgcctgtaatctcagcactttgggaggccaaggcaggaggatccctcaagcccaggagttcaagaccagccagcataacacagcaagaccccatctctacaaaataaataaataaataaaattagctaggtgtggtggcatccacctattccagctactagggaggctgaggtggaaggatcacttgagcccaggaggttgagatagcaatgagccgtgattgcaccactgcactccagccagggcagcagagcaagatcctgtctcttatatatttaaaaaaaaaaaatctatggatctaattcaaatgatgagagttcagatggcaagagcaacctgatttttacttgtggcattgtactgtgtaaattttgtgagccttctcaagtctggtggacgtaaagatgccaataaaggaattctaatgagaaatgggcttgctgccttttaagtcacggagctacagcaagctaacctcagaagccagggatcacaaagaggtaacaggagtcagacaagctgagctgtggcgggacacagaaacaaggggggttctgtgtcccacgggtcccaagaagaaattacgtatgaaattatagctctgggatgacaagagtcctaataatacttgctgggcaaacaaaaggaactcactgcctgatttctggagcctcagagtatgttagcagcaagattctgatgccaaattgactataaacccaacacggggcagccttgccgtggagctggctctcccagtgacagctgggctttaaggccggctcagcagccacaggtcccaaaggaaggatatcagaccctggtggctggaagtggcttcactcaaacctggcatgagggcaaaatcgggtggcccttgggaggcccagacaagagcattgctggcctggagatgaggaagttggagtagggggagcatgtggactgtaggcccccagaaatgctcgttttcatgactgtgatcctaccaatgccgtcgtgggggcaggagctataccctcccaccccaccccaccaggggccactggtaaaatcggtctagtcagagggtcttgagagaaccaccagaagatcactagagaggtgggttatgacgctgggtgacctgtgcctaccagtgagtttggccccactagcttcgttgccagtaaagtacctcccctaacctgactttcaaaactcttggcaagagctctgcagacacaggctgggcacggtggctcacacctgtaatcccagcactttgggaggccgaggcaggaggatcacttgagccaaggagttcaagaccagcctgagtaacataggggagaccatgttgaaataatgagataaatgaatactttttttttttgagatagagtttcgctcttgttgcccaggctggagtgcagtggcgcgctctcagctcactgcaacctccgtctcccaggttcaagcaattctcctgcctcagcctcccgagtggctgggattacaggtgcgcaccaccacacccagctaatttttttgtatttttagtagagacggggtttcaccatgttggccaggatggtcttgatctcctaaccttgagatctgcccacctcggcctcccaaagtgctgggattacaggcgtgagccaccgcacctggccacaagcattttttaaagacatttcatcacaagcttgaccgttctggggttgcatgttaagaactcccgagaaacatcctactgtgctctgagagggggctgtgcccgctgagggctccgtacctgtgtttgcttgaggctgtgcttgggggacaggctccctgtgctgttgaggctgctgacgctgccgtgggacggcgtggagcggaggctgtcttttggtggggggctggcaggcaggacggggacggcgccagggaacacagtcttctttctcttggagggtgggatgagggacgggggcagggcggagggcacgggctccttctccagggctcggtacaccaagtgcatggcctgcaggtgcaaacaacaatggcactgaaggggcaaggctggggccgggaccatcaggagaaggcagagggcagccctttgggggctgcagtgacaggacactctgtcaggacgctcccaagctgaccagagtgaaaagaaatcattcctcatgagttatcttttatgtgtaactttccaagacatgtgttgaattattcctcgagactgaaatgcacacagaaagaatccaatcaagccagactccatatgcatcccttcaccactcagggaggccaccagctccagggctggcaccttcccagtactggatttggaagtctaaagacaccagaagagagacctgtacttcaagacgttcaggagtagtcccagctacttgggaggctgaggtgggaggattgcctgagcccaggagatggaggctgcagtgagctgtgatcgcgccactgcactccagcctgggtgacagagcgagactctgtctctataaaacaaaacaaaacaaaacaaaaaacagtggaactgaggatgcatccatgaggcaggccacagccatagaaataaattccttgtggaaggccaactaataaaagtgcaaggaatgatggttttgattagcacatcaccatttggcagccaccatcatcataattaatcttgccagattaaggcgagactcatcagcgatggtggaactctcatggaagagtctgagagtcatgggtgttgaccgtatcaaggcgtgccccacatgagatgaactgagcacagagggaaaaagagcaactgcccacaggaacccacaaccttgacccaccttgacccagtgatgaatgtcaacatggcagtaagaagacatgttgacatcacgttcccccaggtgggaggcccatgtggggcgggtgtgacctccgtgggattcctgtctcacaagagtgcatgacctgggtcatcaagaggacctggcagccaggcccaggcctaggaacactccataactgctggcctgtgctcttcaaaatgtccacgttgaaaccaggcatggtggctcatgcctgtaatctcagcactttggaggccgagacgggcagatcacctgaggtcaggagttcaagaccagcctggccaacagggagaaaccgcatctctactaaaaattcaaaaaaaaaattagctggctgtggtggtgggcacctataatcccagttacttggaagactgaggcaggagaatcgcttgaatccaggaggtggaggatgcagtgagctgagatcatgccactgcacaccagcctagatgacagagtgagactccctctcaaaaacagaacaacgacaacaaaaaaacaaaaagtccacgtcaagagacacgaagagcgatggaggaactgttctagatcccaggaaacgaaagacaaaagacaacaggatgtaacacacaggactgggttctctttagacacaaggaacatttttgggacaactgataaaatctgagtaatatcctgggattagataataatagacacgctcatacagaatataaggggtatatacaggatataatgaaaacatcataaatgcaatgctatgatgtgaatttcctgattttgaagtggataatggttatgtgtgagagaagtccttgtttttaggaaatacgcactgaagtgtttgtggatgaagaggcatcatgtctgcaacttaaccctaaaatggttcacaggaaaacttcgtgcagcagtgggaagggcgagagagtgatggagggagggaggaagaagggaggagaaagataaaacaaatgtaggaaattagtgacactgggaaatttgactgaagagttttcaaaagaattttctgtcggaggccaaggggggaggtcgcttgagttgagttcgaggctgcagcaagggtgttcacgtcactgcactggagctggggtgacagaacaagactctgtctcaaaaacaaaaaataattctctgtattacaggttgcgtatcccttatccaaaatgcctgggaccacagggtttcagttctggagttttctgaatttctgaatgtgtgtattacacttactggttcagcattactaatccaaaaatccaaaatctgaaattcttcaatgagcatttcctttgagtgtcatgttgatgctcaaaaaatgtcagatcttgaagcattctggtttcagactttcagattaaggatactcaacctatactgaaactttcctacatacaaagaactatgtcaagacaaacacttaaaaaatgaaagaaggaaggctgggtgtggtgtctcatgcctgtaatcccagcactttaggaggcagaggcgggcagatcacttgaggccaggaactcaagaccagcctggccaatatggtaaaaccccatctctatcaaaaatacaaaaaaattatctggctgtgatggagtgcacctgtaattccagctacttgggagactgaggcatgggaattgcttgaacccaggaggtggaggctgcagtgaaccaagattgcaccactgcactccagcctgggtgacagagcaagactccgtgtcaaaaaaaaagaaagaaagaaagaaagaaggctaggtgcagtggctcacgcctgtaatcccagcactttgggaggccaaggcgggtggatcactaggcaggagatcgagaccatcctgaccaacatggtgaaaccctgtctctactaaaaatacaaaaatgaggtgggcatagtggcaggtgcctgtaatcccagctacttgggaggctgaggcaagagaactgcttgaacctgggaggcggaggctgcagtgaaccaagattacaccactgcactccagcctgtgtgacagagcaagactccgtatcaaaaaaaaaaagaaagaaagaaagaaagaaggccaggcacagtggctcacgcctgtaatcccagcactttgggaggccgaggcgggtggatcacaaggcaggagatggagaccatcctggccaagatcgggccactgaatgccagcctggcgatagagtgagactccatctaaaaacaaaaaaaaaaagaaagaaagaaagaaaagggagggagggaaggaaggaaggaaggaaggaaggaaggagggagggagggagacagagagaggagagagggagagagggagggagggagggagggagagagagagagaaagaaagtgaaagaaagaaaggaagaaagacagaaaagaaaggaaaagaaaggaaaaggaaaggaaaagaaaagaaaagaaaagaaaaaagaaaagaaaaaagagagaaagacaaacgaatccagcaacccctgcgcactgcacatttccttcctgggctgggtggggaggaaacagcaggacttaccacagcgaactcatctcgatccaagtgcccatccttgtcaatgtcactgaggtcccagacctgcaagggagagaccagcatgggtaactgtgggaggaaggactgggtgagagtgagaccacctgccggaactcagactctcagccgtggcactcactgggctcaggagacggcagtcaatatacatttcaggaccagtccgcgagttctcagaaaaaccatcacctgtgaagtactgtcaactaccagatctgtggtctgacaatcatcatgattataatcatattgattataagattataagtttaaaggctatactttaaacttaccctgagtttcttctttattgtcttacagagacatcttagaaaagacagctttgattgagtacaggtgttgccctaaacacccacactccctatgctcactcctgcaaaccccacccctcccttgcattctcagctgggcagggctgcgagctcatgtctgagcaggtctgtgggtctcgtctccactccccagcagtggatggtgagacaggtgtcaggccactcagtgcgctgaagagaaggcaggcaggcgtgggttctggagcgtgcctaagacacgtgcagatctcaagcaccatcacgctgccagcttcctgacccatgccagccttcctggatgggcacactgcctgccaggccaacgctgggcaggctgccagtccccggatctaagcagatgcccgtggctctatccatgatgcttcatgtgtcagcatcacctctctccagccaatcaccagggcttcagtccatgcaggtttctcacatctggtcctcctctccacctctgctgctgcgcccgaggctcaggcctcaccagcccacacagccaagagcctccagctggcctccctatcccagtcttgtccctatggctaccacaggaactgctccagaacacacacctgaccctgccccaccctgctcctcagcctggcagatggggccctgtcacctggctgctgctgagcccctgacggtagcaggtccctgcaccccaacccagcctccacagactccacggggacctccacctactttaccagggatccaggactccaacaggcctttctggctccacagtcctccctcagcccagggcttccccacctcagcactactgcctgttagggctggatcatgctctggggtgtgggccatgccgtgcactgcagggtggtgagcagcattcctggccttgacccaccagatgccagcagcactcgacccaggtgtgacaaccaaaaatgtccccagacattgcccaatgtcccctggggggtggaagtgtccagggggagctgtggccctaactggcatgccagactgcctgaggcctctgtgccttcactcaagttgcccacatgcccagacttctaccagagtccccctcaccctggaggatgtgaccaggggcacctcttctagaaagtcttccccagctgccctgctccccgtgctcgagtgggtcaggggccctcccctccaccactgccctcactgggccaaactgtgattatcagggatgctgtgggggtgtctaatggacagggcaggtgaagagggcaggctctagggacagctgctccagaatgcacactggaccctgccccgccctgtccacagtaggacctcatcccttctccacccttccacaactgtgcaaccaaggtgacttcccaaccaccctgaagatctgcttcgccatctgaaaaatgggtggtggaggggtgtgagacacagtccttaacaggagggctgcaagtgctggatgtgtgtcttcacgcagagcactagggcccggcctgcccatactaagccctcagtaaataagtctcagcctcttagctattacttatttgacttctttgacggtatctaattatccccaccttcccactgcccagcacaaggcatggtccactgcaggctctgaaaaatgcttactgaatgactgaccagatgcacgatgtgtgagtgcctggatgcacagatggatgacagcacggatgcaagtgcgcacggatgaatgtataaatatggacacacggggacatggcagcatagacatatgggcacaaagacgcatgcacagatgtggataaatacattgcatgggcatgtgcacacacagatgaatggatcatagggatgcggagggacatgggtgcatagatgcatggatacaaagatgtatgcatggccgggcacagtggctcacgactgtcatccatcccagcactttgggagtccaaggcaggcggatcacctgaggccaggagttcgagaccagcctggccaacatggtgaaaccctatctctactaaaaatataaaaattagctgggcgtgatggggtgcacccgtgttcccagctacttgggaggctgagacaggagaattgctcgaaccagggaggcggaggttgcagtgagccaagatggtgccagtgcactccagcctcggtgacagcgagacttcatctcaaaaaaaaaaaacttttttttaataaataaataaataatacttatatttatggttagatagaaggtatacattctttttttttttgagacagagtctcactctgtcacccaggctggagtgcagtggtatgatcttggctcactgcaacctctgcctcccagattcaagcgattctcctgcctcagcttcccgagtcgctgggactacatgagtgtgccaccatgcccagctaatttttgtatttttagtagagatggggcttcaccatgttggccaggatggtcttgatcttttgatctcgtgatctgcccgcctcggcctcccaaagtgctgggattacatgcgtgagccaccgtaccgggccagaaggaataagttctaaagttcaacagcacaacaggggaactatagctaacaataatttatcatatctttcagagtcttccagaagagaagatttgaatgttcccaacacaaagaaaggatcagtgtttgaggtgatggatatgctaattaccctgctgggatgattacacattgtgtgcatgtatcaaaccaccacgtggaccccacactacaactattatgtatcatcaaaaataaaaataatgaaacgcaaaataaagcaaaacacggttgactcttgaacaacatggtttgttgaactgtgcaagctcacttatgcttgtatttttctaaccaaacgtggatacaaaatacagtagtcgtgggacgtgaaacccgaatatacagagggccgacttttgtatgtgcaggactgattgcaggacttgagtatgcgtacatttcggtgtatgataggggccctggaaccaatccccctaagtataccaagggacaactgtacttttagttaacagaaacaaattgaggcttttaaaattaattaatttggccaggcacggtggctcacgcttgtaatccttgcactttgggaggccgaggcaggtggatcacctgaggtcaggagttcaagactagcctgaccaacatggtgaaaccccatctctattaaaaatacaaaaattggctgggcatggtggctcacacctgcaatcccagcactttgggaggccaaggcaggcggataatgaggtcaggagatcgagaccatcctggctgacatggtgaaaccccatctctactaaaaatatgaaaaattagccaggcgtggtggcgggcgcctgtagtcccagctacttgggaggctgaggcaggagaacggcgtgaacccaggaggcggagcttgcagtgagcagagattgcgccactgtactccagcctgggcaacagagcgagactctgtctcaaataaataaataaataaataaatacaaatacaaatacaaatacaaatacaaaaattagccggctgttgtggtgcatgcctgtaatcccagctactcgggaggctgaggcaggagaattgcttgaacctgggaggaaaggttgcagtgagctgagatcatgccactgcactccagcctgggtgacagagcgagactctgtctcacaaacaaaacaaaacaaaacaaaaaattaattattattattatttttttaaacagagtctcaatccggttgccctggctggagtgccatggcacgatctcagcttattgcagcctcgacttcccaggctcaggtgtgattctcccacctcaacctctagagtagctgggactacagtcacgcaccaccacacctggctagttttttgtatttttttttcagtagggatggggtttcaccatattgcccaagctggactcaaactcctggactcaagtaatctgcccgccccagcctcccaaagtgctgggattacaggcatgagccgccacaccagcctaaattgagggttttttttgtttttgtttttgttttgagacagagtctcgctctgttgccctggctggagtgcagtggtgcaatctcagctcactgcaatctccacctcctgggttcaaacgattctcctgtctcagcctcccaagtgtctgggattacaggcgaacaccaccacacctggctaatttttgtatttttttttagtagagacagggtttcaccatgttggccaggctgttctcgaactcctgacctcaagttatccacccacctcggcctcccaaagtgctgggattacgggcgtgagccaccgcaccaggctaagactttctttaaagagaatgcataaaatttttcctaaatttgcagcagagttgaaaatacttttaccttgagctttatcagaagaaaaagagtaattaatagtagaaaagagccaggagtggtggtgctcttgcagtcccagttactccagaggctgaggtgggaggatggcttcagcctggcagttcgagaccagcctgggcaacacagtgagaccccatctctaaaaactcaaaaaaagaaataaaaaagcccgggtgtggtggctcacgcctgtaatcccagcactttgggaggccgaggcgggtgaatctgagataggagtttgggaccagcctggccaacatggtaaaacaccatctctactataaatacaaaaattagctgggcgtggtggcatgcacctgtaatcccagctacttgggaggttgaggcatgagaattgcttgaaccggggaggcagaggttgcagtgagccgagatcgtgccactgcactccagcctaggcaacagagcaagactccatctcataaataaataaataaataaataaataaataaatagacacagacacacattcccacattcagcacaatggaaagggggaaagcccaagttggggagcttaagactgagctctactggtcccaaagccccaggcagcaatttcacttctgagtccacctcctcatctgtgaagtggaaggattctggcaccttccccagggactgggtgaacactgtaagccacaccctaggaagccctgagccagctggggctggacccacaggagcgctgatgaaagcccctgatggcacagggagaaaacagagcaagagccttgtaagcaccatggggaaagagaacagtggcgcccacacacagcagggacactgagtgcagaagaaccaagcccgtggcccacttaccctgcccaggacatcaagaggcagctttgagttcatgaggactggcttgactttgtctccagagagcaaaccattgatgggcaagaggctttcaaaaatcccatcaaatttggccttttcttccacctagttggaaagaaatagcccgagtaagtaggagagcacacctgtgtgaatgtccagaccgagctctgaccgaaagccaagtgaaaatggccacggacccatcatcacccttggctaaaagcacaaaatgatcttagaacagtcttggccccttggtttccaaagtgaacatataccctgaaggaaataacgttatggcaacctcggatctgggagccaaggtcctcaggagggaggccctggccccgggtcttgtccttcgtcctagctgctgcctgagtgtggcaggagtctcccatggtggggcagtgtctttgcagggagacaaagatcagtctcacctgcctccaaggagcccacttgtaccagaaagacaaaagtgtgagcagatgttagtgcttgagcaaataattatcaaaatcaacttaaagtacaggaagtcctctttttttttttttttttctttttttgagacaaaaatcttgctctgttgcccaggctggagtgtagtggcacaatctcagctcactgcaacttccgactcccaggttcaagcaattctcgtgcctcagcactcgtacctcccgagtagctgggatcacaggcatgcgccaccaggcccggctaatttttgtattttttgtagagatggtgtttcaacatgatggccgggttggtcttgaactcctggcctcaagtgatccgcctgcctcggcctcccaaagtgctgggattacaggtgtgagccaccaagcccagccacatacaggaagccctccatttctaatggtaaataaattaatacgtaaataggaatagctcttcatgaacagagggaaggtacagcattaggatggggagtcacagttcctgctgttctgaaagacatagggcaggcagcccgtaaaaggggccatgagtgaggcagtggcttccagtctgttccaccctccaaaggaaacttaacattcctgaactgtacacttagaaatggttaagatggtaaatgttacatgatgtgtctttcaaccacaataaaaattttttaatttttaaaagacaaaaaccaagacagagccctcagtcacagagatgagatcaccggcagacaccgcatgctttcacagctgttggtgctaagaagctgagcgctgcaggtctttctcgggggcctgggatcctctcctggccatcggacttgctgactcagtgccttcagaagcccagaaatgttcacaacggaaacaaacacttggcacttcgggcttgttctttctgactgtggctgtgaatggaatgcagaatctctctcgaccacagtacaccccaattacagcatctggtcctgtgctccctgactcctctctgcgaggtccccaggcccctcagtcccagctcttccagtgaggcctggacataacccctggtggaaaagagccatcacattttaaagtataagatctcttggcactgtttcccatgacaaagtagctctttttcaaagtccacacaatgcgctgggtgacagggagaaacccttcaccacagtgattgccactggcaaagtgcttgatgacagaggtgactgcatgactcctcagtcacatgacatatcttcatgtcctctccctgcacagatacccccacccagcccatgacctctccaagaagggagcaaaccaaccgtgtaaacatgggacgaaagtgcttgggacctttatttgagagcaagagtgttattcatgtcaggatttaagccacataaacgtgaggaaatgtgacagtctgaaagtgaagggaaggtgaggaggcctgatgttacttggagggaccatgctcacttcctttagaaggaattctgtacttagaagacagccctcgttttttttcttctttctggacgcagtagcttatctttccagccacaacatcctctgttttaaaaataacacttcaagtgctgagagaggcttttcacaaagcaatcagaacatcagggaggaaagaatggtaacatgcaaagtggctggaaagaagcgagaaagcaagggacacatttgggggtccacgtgcttgcaagctctcaccgtttcctcttctattctgaataaccaacacaagcagcaaaaaccacagaatgtgacctaaagatgcaagatttaaactgcagccctttaataatccaactcctgacacttagttgtccaggtaggcaactcccaattccagtgaagggccacagcctttgtaaaaggtgttcattagaagaggcgtttcatccaagtgctgtggccactcacactgagacagaagagctgacacaatcatcctataaaatgttctgaacaacatcaaactagaacaattccagaacaattctagaacaactgctggaacaattctatctgaaggagagccaaggagggagctattcccgttcacttaccctcacagcccagtgggcctctgcagagggcggtgtgaccatcagagggctgctggtgtcgtgctgagaagagagagaaacattcctttgtggctggcacagaattaaatcataggtgggtgggtttgctgaaaaggatacacgtttcaaagtgctttcaaaaaagggaagacttcacaaagttaaacacagaatcaccacatgacccagcaattccactcctacgtattgacccaaatgaattaaaaacggatgtccaaacaaatccttgtacatgaatgctggtagcagcactattcacaacagtcaaaagggtggaaataacccacatgtccagagagatgaatggataaagatgtggtccatccagtaaatggaatatggaaacactgatccattctacaacatggatgaaccctgaaaacacgatgctgagagagaggccagacacaaaagaccatgttagagaattccattgataggaaatgtccagaacaggcaaatccattgacagaaataaaattagtggttgccagcgactgggagggggagacaaggagtgattacttaatgtggatggggtctccttgcggagggatgaaaaagttctggagctagacagaggtaatgaagacacaacactgtaaatgcactaaataccactaaatagttcactttaaaattattaattttctattatgtgaatttcaccacaataaaaggggaaggctagagaaaacatggaaatatacatgcacatacacacatgcacatacacacacacacacatctggtattagaagaatgtgaacttgaaggacttggacactcacaaatttaggcggtggcatgctcaaattcagattgctcaaggtaacttcatggccactctgtgcacaggccaccagtctcagtgcaacatagaaaccctgcaagtccaaagaaagggaaggagtaaacagcatatcgccagtgagggtagggggagctgtctctaacagcaggcttcagggaaagaggatgtgcacttcaacaatgaaggccgtccgtgcaaaaaccccttggagcgttgggctgaactggactcaccttggggacatcgcttaaatgaatacactaaaatggacttatcctggccaggtgtggtggctcatgtctgtaatcctagcactttgggagaccgaggcaggtggatcacctgaggtcaggagttcgagaccagcctggccaacatggcgaaacctcatttctactaaaaacataaaaatcagccaggcgtggtggcaggtgcctgaaatcccagctacttgggaggctgaggcaggagaatcacttgaacccagagggtggaggctgcagtgagccaagatcatgccacttcactccaggctgggcaaaaagagcaaaactccgtctcaaaataaataaataaaataaaataaaatggacttattccactgcatctggaaatctgtaaaatttcagatgcatatattttccaaaaactatgagctcccaacatttaggaaatgttaggttgtataaagcaacaaaattaaacatggttaaggttacgaatgatggaccaaatatgtgccgaatttttgtttgttttagagatagggtctcactctgtcacccagagtgcagtggcgcaatcacagctcactgcaacctcaaactcatgggctcaagcgatcctcctgcctcagcctcctgagtagctgggaccacaggtgtgcaccactatgcccagctaagtttttatttatttttttagaggtgggatctcactatgttgcccaggctggtctcaaattcctgtcctcctgccttagcttcctgagtagctaggattacaggtatgagccactgcacctggctatgtgttgaattttttttaaagcagtcgtaaatacacacggttggtcagaaactcatatctgtggttcaccacgatcccctcggcctcgttgaatggaacatcccctgcccacccccagtggcctgacgtggaccccacctagacacgggaaggaagttgaactaggctgtcaggtgcctccctcctaacccaggacccaccacacaaaggctcagtggacttgtgagggatcacttagcttgttttttttctgtttttttttttttttattaactggcctaagaacatggatacttttaaagctataaatactgttaacagttttaaaagtgtcttcaaagaggtaagtgctaggatcggcctttctcagcctgctgtcctcagaagcccttgcagagtgtagaggatcataagagggttttgagaaaaggggacctttcatccctgcaaggtctgagaaaagagaaaaattaataaatagtaaagaaaaaaagaaaaaggaattaagtaagtttagaggaactgcattaagcaaagtcaaatttattttccataggaattctcagaacttttaacatgcagacatgaggccgggcacggtggctcatgcctataatcccagcacttagggaggccaagatgggaggattgcttgagcacaggagtttgagaccaacctgggcatagtgagacctcgtctctacaaaaaaaataataaaaattagccaggtgtggcagtgtgtgcctgtggcctcaggtacacgagaggctgaggcagaagatcacttgaacccagaagatcgaggctgcagtaagcagtgatcgcaccactgcactccagcctgggcaacagagcgaggctcaaaaaataaaaaataaaaaaacaaaacaacaaacatgcagacatgcaccatgaacctcaaagaagggaggtacaagtgaagggggcttcctggacagactggatcacaagtcatggcacagcacaaacaaggtcccttctaacaaaatggccatctacgaccacttaaaatcacttataagtacaggctgagtattcctcatcccaaatgcttggtatcagaagagtttcagatttcagattttttttttttttttttcagatggggttttcactgtggaggctaaggcatgagaatcttgtgaatccagagggcagaggctgcagtgagccaagatcatgtcactgcactccagcctgggcaagagttagactctgtctccaaaaaaaaaaaaaaaaaactctgattaaggcctttagtcaaagttacaccaatgtctactttgttacattaataacaccaatgtggctgggcgtggtggctcatgcccataatcccagcagtttgggaggccgaggtgggcagatcacctgaggtcaggagttcgagaccagcctggccaagatagtgaaacactatctctactaaaaatacaaaaattagccaggcatgatggttctcgcctgtaatcccagctactccagaggctgaggcaggggaatcacttgatcctgggaggtggaggttgcagtgagccgagattgcaccactgcactccagcctgggcaacagagtgagactccatgtcaaaaaaataaaaaataacaccaatgttattttctggctctgatcactgtgctgtggttatgtaagacaccatcactggggagagctggcaaaagatacacaggaaccctccaagctatttgtgcaacttccacgagagactggtccaaaataaaaagtctggacaacactttaatcacatgtaaggttacaaaacattaaaagaaaaataaataaataaataaataaaagatacactagccatgaaagatggctccaagtgtttaaaagacctttatttcaaaatgaaaacttcccgtgttaagtttgacagccgtgctcatgcctagtaatacttgacagtggaggaatgtggaaggagccgtggaggtcacccagcctgggggctctgcccagcccctccatttgctctgtgtacatgtgtatatacctgtttgtccaagaaccctttaccttctggatcggccaagtcccatatctgcggaaacacaaaaatgctcataagcatgactgccgatcactgtccacgtgttaacaaaaaccagagccgccaccaccccatcactggccttgcggggcaggagtgactgtccccaggttgtcctgcagatgaagaagccaattcagagcaggtgaatgatctgcccaggggcgcacagccagtcagcggcagggcccagaggacatccaggtgcactcagctcccaagccaatggtgtttatgacacccttcttcccccaactaaagtccgcaagtggccaagcgcggtggttcacgcctgtaatcccagcactttgggaggccaaggtgggcgattcacctgaggtcaggagtgcgagaccagtctggctaacacagtgaaaccccgtccctactaaaaatacaaaaaattagccgggcgtggtggcaggtgcctgtagccccagctactcgggaggctgaggcaggagaatggcgtgaacccagaaggtggagcttgcagtgagctgagatcacgctactgcactccagcctgggcgacagagcgagactgtctcaaaaaaaaaattagccgggtgtggtagcatgtgcctgtaatcccagctattcaagaggctgaggcaggagaatcacttgaacccgggaggaggaggttgcagtgagccgagatcgcgccgctgcattccagcctaggcaacaagagcgaaactctgtctcaaaaaaaaaaaaaaaaaaaaaagtccacaagctatcaagaccccaaaagtactcgggtttcttatctgctaccaaagtagtggtgggggctgccacctgggcatttggatccaccagctgcagcctgagaggtctgcagcgaccaggccactacccaggaggccgggccccatggaaggaggcctgcacaggctggccctgacctgcggggggagctgtgagggcagccacagaagagaaatcactattcatcttcacataccttcccaaggataatgtccgagaggccagacttctttagaaaaagcgcagcttcactcgcccccaccctccctgtgtatgccggatcgacctgaaatgggagaccaagaggcaaaataacttttcagcaaatgcagcagcaggtgaagtggcacccgccacgctaactatccgctgacagtgaacagaaaaggacaaaaggccgctcagccgggcttctattctgtactgtgctttcagctcaggcatgctctagttccatctgaagagacatcagctaaacttacctgcttgtaataagattcatacaacgaatttccagtgggaatctgtaaatgaaaccacagatattggtcaaaagtgaacacaaccccttggggaaaaaaagggttgccccctcaattttgtcatgaccaaaatatatgatgatagttagagtcaaaatgcatgcactttaaacatcctctgaacacagaattcagtttatcttcagacacagatattattatgcttacctgatttagaaaaagtaagcttaatgttctttaataaatcctgattctagggcaaacaatatagtcactcaggaaacagcagcagcagcccagtgtcaatttccattcactgagcaaagggatttcagctcctggagagctcagagggaaaggacactctatcctctgagattgttctctggctccggaatcagaaaagaagtttccacgcattatcataaatcaccaggcctgcaagctttcgaccagtttccctggcctgggtctggttctcaaccatcccatccatcctcctccagctacctgagtgctcagagacgcacactgaccagcccgcgcccggagagcgctggccagtaactgttcccaccagggaaggaaggaagtgcagtgtcctcagcttggcactgaagatattccatttcccgacacctcagagccccaagacatcgctgtttggaggtcacttccccatctagggtcacgcagctaatcggggccaccagaggccacacctggatccagcctggctggcggccaagtccagacacttcccgctgtgtcctgagctctgccagacgtctcccagggaaggggagggacacccaggggagtgtgccaacctggtggggaattatgcagtccctgaaatgctggctgtaaaagtttacgtgcgttggtgttttagtaagtgaggtgaaaaaagagcacacaaacctgccgctgatgtaataagcgataaaagtgaagaatgcacaatgacacctaattatacagaatggatgtgtaaacagctaaagagaatagaactgggcagggaaaagaggactatcttgggggcaggattacagtgtttatccaacaaattctgggactgctgttgtacgatttctcacaatgaataaaaccagggggacgtagactccttccagttatagtcattggatttgaaccaatacgcacccaccacttgcatattgttgtgctacaaagggtcatttgaagctaaaaataatgcccaggccgggcgcagtggctcacgcctataatcccagtactttgtgaggccaaggcaggcagatcacctgaggtcaggagttcgagacctggccaacatgacaaagcgagacaccatctctacaacaaatacaaaaattagccaggcgtggtggcatgcacctgtaatcccagctacttgggaggctgaggcaggagaatcgcttgaacccaggaggcggaggttgcagtgagccgagatcgtaccactgcactccagcctgggtgacaagagtgaaactctgtctcaaaaataaaaagaaaaaaataataatgcccggattatggtcagcgtctctgggggacgccaacacctgtgaatgtataaagaagtgaaagttgtaatcccaaacagcactttgggaggccgaggcaggcagatcacgaggtcaggagctcaagatcagtctggccaacatagtgaaaccccgtctctactaaaaatacagaaaattagtcaggtgtggtggtgtgcgcctgtaatcccagctactcaggaggctgagacaggagaattgcattaatccgggaggcagagattgcagtgagccgagatcgcgccactgcactccagcccaggcgacggtgcgagactccgtctcaaaaaaaaaaaaaaaaaaaagaagtgaaagtacagagaaaactaccatgacaaaatgaaaatagaaggaaaatagcataaagatctgaaaggggagagggaaaaagtcaaaaaaaaaaaaaagaggaaaagaaagggggaaacactgaaaaggcagaaaaaactagaataacatgaaaaagcaagaaaagccagagatttaggagccatcattttaaaacagacaaagacatcatggaaaagacataggaggtaagtgtgtatagcaacagcagccccaagatggctgcccccctcgtgcttggaggcagtgacaccattcctgggtgaggggtacaggaaggagtggctatcacccttagcatcttacaacctcgttagatgacagtgtccagccatcacacctgtgtcaacttctgggctcaaactccagcttatttccaaaatatgtctccccagaggaagaagacccacagaaaggaggccaaggcaggcaggctgtttgtcatctgtcagtaaaggtgacagtggtcaggtctaggcagcaaacagcacatcgcctgccatgggttcacagactccagaggccctcacttcagatgacaaaggtgcccttcctgccaatgatcagagaggtctggatctgaagcacatttccagacaagtttttttttttttttttgagacagggtcttgttctgtcacccaagctggagagcagtggcgcaatctcagctcattgcaatctctgactcctggattcaagccattctcctacctcagcctcccgagtagctgggactacaggtgcgtgccaccatgcccacttaatttctgtattttcagtagaagcgaggtttcaccatattggccaggctggtcctgacctcaggtgatccgcctgctttggcctcccaaagtgctgggattacaggcatgagccaccacgcccagccccaggcgagttttttaacaatctcatgggaagcaagggaaagaggtttccaagctactgtgattccagtggaaaaaaaagagtttcagtctttgaggcatgcagggttattaaatatctgctctacttcccaggcgctaatgagcaacaagatccgcaaccaagagaaacaaggcctggactaatccagaagagtcgctgaaggacacagcccagagctccaacctctgcccatccatgctaaaggctcatccggctcgaacacttgatgaccaccggatgtcactctcaaaagacctacagctgagggaaagcccagggagtatggctcaaccattgctcatcaccacgggagtccatctgggtaacctggaacaatgacagtggtcagaggttttgatctaattacacatatgtcaggttttgcatatgcaaaagcagaagggggaagaaagaaggtacagcaccaggccccaactgccacttcctcttatgccaggcttcttcccaggaacaatggactcacacctgcacgctgccctgatatgtcattgcgacagaactgaagacacatgttgctaatgacataaatccccagccccaggcagtctgtcactggcccctgtgcagagacctcttggcccccaaaaggaagattcacagctactgggaaagagccctctgtatgctgagagcagcctctggagctgcccacccatgtctgaccccaaagtgagcctggggccaagcccgaggcaacagcagagaggggacgcaccaggggatgaggcctgcaccgtaagaggctgcaggtggcaccaggatggccgtaggaatggaaggaagtgcagcagagctgacccgatgtgttctcctgacccagcccactgtgctgagaagacgccatcttcgcctctgcagtgtgtgaattgttgatgaggttcagtgtagctttcagctcggtctttcagttgctcttcctaactcaaaatgctaagagacaacatgcaaagttcctgtggcctcctcacttatcctccagcccagaaacaatttacaagtgggatgacagagagaggggcacaaggagaaggacaagttcacatccttctgctctgaaggctttaaaacaccgcaattcacacaagcgcctgtaactgtaacccaggacaacagcagttgagatggagaaacccagcagaaccacctcggaggagaaactgtctcaggattgtgttctaacgactcctaagcagggttcacccaactctgatccccgcacgtggccgagggcaggacgcctcctacatcttcatgcctggctgcctcctgcccaaactctcactctcactctgctagcaaagtacgcgctcttgtgcaaaacaaaccaatgatcatcagccttggttcaaaatgacttttggaaagcaatccattttcactgtaaaatgttcagagaagtacctataatcccttgtttcctatccagtacctctcatcctcccgacaacgctaaagggcaggtaatattactagtccagttgacaggtggggaaactgagtttgccctactcaggaccacaacagccaatgagcaacagtcagtgaagcacccaggataggtggtcctggagtcagaccctcacctactgtgcaccctgtaatgacagcccaggtgtcacagggctgtgcaccggaccacaggacagcctcatgcatatgctggcctgggaaaatgcacgtccgtgatgacgtgctggagcattttattaaacagaagaggtcaaaaggcaacactcaatttgagcatataaatggacttgaaagccagtgttttcgatgacctgccatttccccaggaaagctgagaccccataatggctatgtttttcaatgccactgccaagttttgcaggaagttaggcatataacactgaaacacatctcagtctgagttcctacttagaaaaacatatggatgcaaaaacatagcccggagtagagcttgcttgataatccttccatttctgccttccccttagaggcccccacaggccttgcacaaccatcacccaatgtgagcccagccctcccagcaggccggcccacattctgcgggtgagataacctggctcagtcatgtggcaagcacggggcagaactgggacttgactcaaaacattcaaaaggcatcagggaaacgctggggtatgtctaaccttcctggactggatgggcagctctctccaactgctccatcagaggtttctacagcagagctaaggtaaatgttaccaagagaaggagaagacttggcaagtgaaaagagagcttttccaaatcacaaggaaaaagacatctcaattaaaaatgagcaaagagagaggcaattcagaaagaagagatgcagcaaagttagaaagaaaatgttccatctcactagtaatttaagtattacagggccaggcactctggctcacacctgtaatcccagcacttagggaggccaaggtgggtgaatcacctgaggtcaggagttcaagaccagcctggccaacatgatgaaaccccatcactactaaaaatacaaaaattagccaggcatggtggcaggtgcctgtaatcccagttactcaggaggctgaggcaggagaatcacttgaacctgggaggcggaggctgcagtgagccgagatcataccactgcactccagcctgagcgacagagcaagacttcatcttcggaaaaaaaaaaaaaggcagagaagctaaaacaattctgaaaaagaataataaagtggaaagagtcagtctacctgatttcaagactgactctatagctagagtagttaagacagtggagtattggcagggggcgggcacagacagtaatgcacagaacagaatgtagaatctgagaaacagacacacacagatctgcccagtggatttcttgacaaaggtgcaaaagtatttcaggaggaaggaaagcctttccacaaagggcactggagcaatcggcatccataggaaaaacatgggcctcgaactaaaagtcttatgcctcgtacaaaatgtaactcaaagtggatcatgaattcaaatgtaaaacataatcctcaggatctagggcaaagcaaagagttcttagacttgacaccaaaagcccgattcacaaaaggaaagattggcagacaaactttatgtttgcactgtgaaagagccatgtaaggcctggcgtggtggttcatgcctgtaatcccagcactttgggaggccgaggcaggaggatcaccagagtttgggagttcaagaccagtctgacctacatggagaaaccccatctctactaaaaatgtaaaattagccaggcatggtggcgcatgcctgtaatcccagctactcgggaggctgaggcaggagaatcgcttgaacccgggagatggaggttgaggtgagccgagatcacaccattgcaccattgcactccagcctgggcaataagagcaaaattccgtattaaaaaaaaagggggggggagaaaggccgggcgcggtggctcacacctgtaatcccagcacattgggaggccaaggtaggcggatcacctggggtcaggagttcaagaccagcctggctaacatggctaaaaatacaaaaaaattagctgggtgtagtggtgtgcacctgtaatcccagctacccaggaggctaagccaggagaactgcttgaacccagcgggcagaggctgcagtgagccgagattgtgccactgcactctagcctgggtgacagagcaagactccgtctcaaaaaaaaaagccagataaaaaggtgaaaaggcaagctacagactagaaagaaaggtttgcaaagcacatatccaacaaatgactactatctaaaatatatactagagagctctcaaattcaacagcataaaaaagaaaacaatcaaattagaacatgggcaagccaggcatggtggtgcgtacctgtagtcccagcactttgggaggccaaagcaggaggactgcttgagcccaggagttccagaccagcctgggcaacatagtgagaccccatctctacatgaaattaaaaaactagccaggcgtcgtggtgcacacctgtagtcccagctactcaggaagccaaagcaggaggattgcttgatcccaggagttcaagaccagcctgggcaacataacaagatctgatttcttaaaaaacaaacaaacaaacaaacaaacaaacaaaaaaacacgaagaagaaaagaacatgggcaaaagatctgaaggcaaaaagacattttaccaaagaggaaatatagcagatggcaaataaacgtatgaaaatatgtttaacatcattagcaaaaagaagaatgcaaattaaaaccacagtgagatgccactgcacgctatcagagtggctaaaataacaaatagtgacaacatcaaatgctggtgaggatgcaggcaaactgggccactcatacactgctgatgggaaagttaaaaggtacggtgactctggaaacagactggcagtttcttaaaacaacaacaacaaaaaaaaactaaacacaacatgaaactaccgcatgaaccagcaactgtcctgggcatttacccgggagaaatgaagagtcatgttcataccacatcctgtatgcagtgttggccacagctttatatgtcactgctccaaactggtaacaccccggatgtcctccaataagtgagtggttcagcaaactgtggtccaagcacaccatggaatactactcagcaatgaaaaggaatgaacagctgacacatatgcaataatctggatgactctccagagaattatgctgaatgacaaaggccaaacctcaaaggttacatactgaataattccatcacataacatcattaaaatgataaaattgtagaaatgaacagagtggtggttgccggggataaggaagagatgggctgggagggaagtgggtgtggctataaaagggcaacaggagggacgtgttctgtacctggctatcaacaagaccctatctctacaaaaaaaaaaaaatagccacgcatggtggcacatgcctgtggtcccagctactcaggaggctgaggcagaaggattacctgagcccaggagttcaaggctgcagtgagctatgatcgtgctactgcactccagcctgggcaacagagctgtctcttaaaaaagaaaaaaaaagctttcaaaccttgattccgtgctctgatgccctccccagtccatgtcattcaccttgctgctttgctgaatgtctaaactctcaggggtggttctattgcttctcggttcctctccagggcagggaacgcatgccttacccctgtgtcatgccccactgcaggccctgagttctgtctgggctggacggaggccgtgagccccaggcatgtccatcttctttttttttttttttttttttgagacggagtctcactttgttgcccaggctggagtgcaatggtgcgatctcggctcactgcaacctccgcctcccaggttcaagtgattctcctgcctcagcctcccaagtagctgggattacagatgcatgccaacacacctggctaaatttttgtattttttagtagagacagggtttcaccatgttggccaggatggtctcgccctcctgacctcaggtgatccacccgcctcagcctcccaaagtgctgggattacaggcgtgagccaccacgcctggccagggcatgtccaacttctgctggtctcgcaaggtggtcatttgggtccccagagaatccaggactcttccttcagaacctgaacatagccatcatcatcaatatcccagatgcaatactgtaccaccattatgcaaatgttgcttcagaggaaactggataaatggtacaggctcttttttttttgagacaagagtctcgctctgttgcccaggctggatggcagtggtgcaatcttggctcactacaacctccgcctcccaggttcaagcaattctcctgcctcagcctcccgagtagctgggattacaggcacccaccaccgtgcccggctagtttttatacttttagtagagaccgggtctcaccacgttggccaggctggtcttgaactcctgacctcaggtgatctgcctgcctcggcctcccaaagtgctgggattacaggcgtgagccaccgcgcccgcccagactctccaacaactgcaagtgagtctaccatcatctcaaaatgagaagttttgttttttctttaaagacttaggaaacctaatgaccaaatgcaaggtgacatttgcagacaatcagggaaatgtgaatatggtcttgttatcagataataccaataccaaaggcgttattattagttgtgtaaggtgtgataaggcattgtggttatgtaaaggaaaacggtcttaactgttagaggtgcatgttgaaatacaatttcttttatttatttattttattttttttattttttttgagatggagttttgctctgtcgcccaggctggagtgcagtggtgagatctccactcactgcaagctccacctcccgggttcacgccattctcctgcctcagcctcccaagtagctgagactacaggtgcccgccacctcactcgtctaattttttgtattttttagtagagacagggtttcaccatgttagccaggatggtctcgatctcctgacctcgtgatccacccgcctcggcctgccagagtgctgggattacaggcgtgagccaccgcgcctggcctacaatttctaagattaaaaaaaaacaggccaggcacggtggctcacacctgtaatcctagcactttgggaggtcgaggcaggcagttacctgaggctgggagttcaagaccagcctggccaacatggtgaaaccctgtctctactaaaaatacaaaaaaattagctgggtgcggtggcgtgcacctgtaatcccagttactctggaggctgaggcaggagaaatgcttaaacccaggaggcgtaggttgcagtgagccaagatcacgccactgcactccagcctgggctacagagtgagacttcgtctcaaaaaaaaaaaaccacacaacaggaggctgggtgcagtggctcacgcctgtcatcccagcactttgggaggctgaggtgggtagatcacctgaggtcaggagttctaaaccagcctggccaacatggtgaaaccccatctctactaaaaatataaaaattagccaagcgtggtggcaggcacctggaatcccagctactcaggaggctgcggcaggagaatcacttgaacccgggaggcagagtttgcagcgagctgagattatgctactgcactccagcctgggcaacaggagtgaaattccatctcgaaaaaaaaaaaaaaacacaagccagagccaggtgtagtggcactcgcctgtagtcccagctactcgagaagctaaggcaggaggattgcctgaggccaggaattccaggctgcagtgagctatgatcactgggcctctgaatggctactgcactccggcctgcacaacatagcaaaatgtcatctgaaaaaaaaaaaaaaaaaacctaagaactaaaaatatacgtaggtgggggaaaagatcaaagggtggtacaaagaaatctgcaaaatattgataactgttgtaaatgggcagtgggtacatgggaattcattaaacccttccctctacatctattttatttttttatttttttattttttttgagatggagtctcgctctgtcccccaagctggagcgcagtggcacgatcttggctcactgcaagctccgcctccccggttcatgccattctcctgcctcagcctcccgaatagctaggactacaggtgcccaccaccatgcccagctaatttttttgtatttttcttagtagagacggggtttcaccgtgttagtcaggatggcctcgatctcctgacctcatgatctgcccgcctcggtctcccaaagtgctgggattacaggtgtgagccaccgcgcccgggctttattttatttttcatagagacagagacttgctctgtcacccaggctagagtacagtggtgccatcatagctcactgcagcctcaacctcctggacttaagggatcctccttccttagccttccaagtagctgggtctataagtgcatgccaccacacccagctaattactattttttattttttgtagagacggggtcttgctttgttgcccaggccagtctctaactcctgggttcaaaagatcttcccaccggggcctcccacggtgctgggattataggtgtgagcatgcccagccatcaacttttaatgtgtttaaaggccatttgggctgggcacagtggctcatgcctgtaatcccaacactttgggaggccgaggtgggcggatcatgaggtcaggagatcgagaccatcctggctaacacggtgaaaccccgtctccactaaaaatacaaaaaattagcccagcgtggtggcaggcgcctgcagtcccagctactcgggaggctgaagcaggagaatggcgtgaacccgggaggcggatcttgcagtgagccgacatcgagccactgcactccagcctgggcgacagagcgagactccatctcaaaaaaaagaaaaaaaaaatgacttatcgggtactatgttcactaccagggtgacaggatccgtattccaaacctcagcatcatgcaatactctcatgtaacaaatatgcacatgtactctctgtatctacaataaaaaaagctgaaatccaagaaagaaaaaagaattcctataaaaaaaaaaaaaaggccatttgatgtgcttctgccttggcaaggaccctaatggcacaagctgcgtcaggtttaagtgtgacaaatgaggagagcttggtgacaggatcgtgcttctgtgaaacaatacaaactggcattcctttagaacacacacaagtgtgccctaccatggctacaaggtctgctcctgggagactgagaagtgatgcaggagtgggggaagggtaagagggttcgctgttttccccccttgagggcacagatgcagactgcaaggcactggaaacagcagaggactggttaagctgctaataaattgctgagtctccatgggacagaataaataccttacagccatcaaaacagcagaatgtttacaaatggggtccaatcttcatcagcttgctaaatgagaagggggcaatctagcaggtgcagtgtgtgacctggcttataagcacacggtatcctatcgccccgctactggaacctggcgggacagggccatgcttaccaggatttctacgggccagctagtttgcttcctcatggcttcctatgttccctggtgtactatgtcagcatgagctgcttttgtaaattagacagaaatagaaagatgtgcaaggaaaagcaggatctgaaggaattttcatggattctccccagggacccaaatgagtgccttgtgagaccagcagaagacgaacatgctcggggctcaaggcctccatccaaaccagacagaactcagggcctacagtggggcatggcacaggggtaaggcctacagtcgctgccctggagaggaaccaacaagcaagagaactgccccgagcatttagacatgcagcaaagcagcaaggtcaatgacatggaccaggaaggtcgtcagaacacagaatcaaggtttgaaagctttcttttttcttttttttttttttaagagacagctctgggccaggcatggtggctcacacctgtaaccccagcacttttgggggctaaggtgggtggatcacctgaggtcagcagtttgagaccagcctggccaacatggtaaaagcctgtctctactaaaaatataaaattagccaggtgtggtggcgcacacctgtaatcccagctacttgggaggctgaggcaggagaattgcttgaactagggaggcagaggctgcagtgagccaggatcacatcattgcactccagcctgggcaacaagagcgaaactccatctcaaaaaaaaaaagagagacagctctgttgtccaggctggagtgcagtggcacgaccatagctcactgtagcctcaaattcctgggcttaagtgatcctcctgccttagcctcctgagtaattgggaccatagccatgcaccaccatgtgtggctaattttttttttcttttttttgtaaagattgggggggtctcattattttgccaggctggtcttgaactcctggcctcaagcaatcctcctgccttggcctcccaaagtgctgggattacaggcatgagcaccaaactcagcattccagaaacagaactgctggagaaaaaacattgcctgcagcaggcttcctgcctcgatgcactgccctgtggaggatgcaggactatgctgagccctaaacgtcttcaggagagactgcccagctccatctacacctatgggctgtgttctcccatcttgcttcactaagagaagctgtctcatgtggaggtcaacagtgctgccagacaaatgtggatttgagtcctgtcctgctgctggaatgctgtgcaaccctggggcaggacgagcagcctctctgtgcctcagcttctgcatctggagatgagggtgagcactcccacccccggggacttgtcaatcaccggctgttgtgattcctggtatcctcctcatcgccctccttccactggctccaggtaaaaatgtaccctctccccagaaacatccctccatctctcttccacctccagctactgacctccccccacccttcgcataaaacctcctgaaagccaggcgcagtggatcacacctataattccagcaatatgggagaccaagacgggtggatcacctgaggtcaggagttcgagaccagcctgaccaacatggagaaatcttgtctctactaaaaatataaaattagctaggcatggtggcacaggcctgtaatcccagctactcaggaggctgaggcagaagaatcatttgaacccaggaggcagaggttgcagcgagccgaggttgtgccattgcactccagcctgggcaacaagaggaaaaccctgtctcaaacaaacaaacaaaaaaccctcctgaaaaagggtccacccttggattccccagctctcccttctttggacctggaaatttatttgtttgctcactcaatcaacacatgctgaactcgtgctaagaggcagcactgaggatacaaaagtgtgtaggacagagtcctgggcttcaggccaggcgtggtggctcacgcctgtaatctcagcactttgggaagccaaggtgggtggatcacatgaggtcaggagttcgagaccagcctggccaacatggtgaaactctatctctactaaacatataaaaattagctgggcgtggtggcgggtacctgtaatctcagctacttgggaggctgaggcgggagaaccgcttgaacccaggaggctagaggttgcagtgagccaagatgatgccattgcactccagcctgggtgacaagagtgaaactccatctcaaaacaaaaacaaaaacaaaacaaacaaaaaatagagtcctgggcttcaggaagggcaggcgggacaaagtcagcccaggactatggcacaggggaccgcatgatatgactgcagcagtaggcacagtgaggggaactcagggcttggggccaggtgtgcaccgggacagagaagacaggtgagctgtgggtgattcagcacggccccagtcaggtggaagggcatgtgcataggatgccagggtctgtgcacgctgtgctgaaaagacaggatgtcatccccagggcaagcagaacatggggagggggtgcctgcaggccagcaaggtgggcgcatatgcatatgagatggtaaacggcagaaatccgctgcaaggagcagggctggaaggaagtgatcagagagagactgccatggccctccagcagcagaactccagcagcctggggactgcagcgactcacaatgcagacacccggagaaggaggacatgccagttccctaaaaacgaatgtgtttccttgggatgtccccaggggcattgaggtggaaatctaattgccattctagacaccttggtgcaggtgtggaggtgaacaacgggacattccccacccacagcctcatggagctgtgacaaagcacagagacggctgccaagagctagatggaagagacaggatggagggccagtccgcagccagcagcagacatacacccagggcaccaggagacctggaaggccccccctccatggctgagcctgtccagggagactcagtcaagcgaggctgtggagcacccgcaccaaagcagtgccagagacaggcttgccacggggagggagggaggaggctccaccacaggaaataccagggcagctgggtcctggagggatggaggggcgggcgtgtagggaagggctcaagggtcttgtgcagccatgcagagggcagaagggatggaactggaatggcgcccgggcaggaggggaacagattccagccctccctcctgaaaacgctgcttaagagcaaaagcagatgaagcctctgagcagccctcccagctgctgacctgtgtcccctggacatcacccctcccgggcatctcagagaacagacctattcagttccatctgtttccttcctctgacccatgagcggtctccctggagagacatgggagagcagtcacccaagactgggggggaggggggaacaccgagaggggctcaatgactcagcagtgtgtcctccgcagcaggaacacccaccgcctcccacaagggcccacttcccagagtctcccaactttccaaagtgtaccccgggccttcccaacattcctttcctgcatcagctactcctgggctccaatgtccctgccatctactactccctaacagagcacactgcccaggactcggttgggatgggtctggcctcctgtcggggtgttcctgacagtggggggtggctccctgccaaggacgccaagatcccctgcactggccaggtcagtgccatgccaccttcctcctcatcgctgtgggtgacagcgtcagcctcctagtgcactgttctttttctggcccctctaaacatcaggcacccctcgaggctcccggaccccacagtgagcagaaagatggttgctgccaccatggagcatcatagtcagggcatcaaagccagtgagctgacacacacaccaacacagaagagcaaatgcacagcaggggtgacaaggacaaggacaggggctctgtcctgatgggagggccgccccgcccccaccccgcttgccccatacatgcctctacagagcctggcccagcctcctcacccacggccctgccttcacccgcttccccactgcacctcgcacacagccactcctctgctcagaaaggctcttcagggtgtgtaacggaggctaaggtccaagccctgagcccagtcctgaaagtgctccctggccatctcctaccttgccgggctgatttcactccacacacacactcactcacacacactcagccacacacacatacacacaatcacacatgtacactcaggctcacccacatacactcacactcacatatatcacactcaagtctcacctccttcccccggctggcagagctctactgaacatatcgggcacctttcactccttgtcttggcacaagatgcagtcatgcatcgtttaactacagggatgcgtcctgagagttgcatcgtcaggttaatttcatcgtcgtgaggacatcctggagtgaacttacacaaacctagaaggcagcgcctgctccacgcctgggctgtggtctagcctattactcccaggctacaaacctgggcagcgtggcccggtacagaaaactgcaggcaactgtaacacaatgctaagtagctgcgtatctaaacatatctaaacatagcaaaggcacaggaaaaatacagcagtataatcttacgggagcactgtcacatatgcagtccatcatggttatgcggtgcgtgactgcattccctatgcttggggccgctgcctgctgcaggccaacgccctgctctaagatgaccctaggttcccccaaatgaaataagtccctcctgcctccacactcccatagccccaaactttgacaagggacacttcctgaagttgatttgatggaaaagctgctgtaatgaccggcccctctcactacattcttaatgcctggagggtggagggatcacgctgtgccctcctagaagcaggccttcagtaaatgtctgttgagggcatgggtgagattaaagtgttgagggaggcaggtggtgggctgagtgcaggaaggtgcagttggtagtggggagcgggcagacatagctctgtggctcagtagcagtgaggacaagccaccaagccaccctgggcctcagtgtccccatctgtaaaatgagaatagacagcacctggcctgaggatgctggtaagtcccaaatgagaatatgcaagtgaaatacactctgcaatgggaagccattattacatcccctattatggttactcttgtattattattcctgagacaggggagcaggccgtatttacaaagaatggtgggcggggagggaggtcaggcaaggctgtgaatcagcacgtgagttgcaggtgtaaaatcacagtccttatagcctgccctgccaattgatctttgccaagcaataaagtatttcaacaaatgttggctacactatggtacatatggtagccatttgctctctcaactcaacagctaagcagctcccaacatctaggatagaacaatatttcagtttgggaatggtggctcaggcctgtaatcccaacactttggagattaaggcaggaggatcccttaaggtcaggaattcaagaccagcctgggcaaaacagtgagaccctagccctacaaaaattaaaaatcagaaaattagctgggcgtggtggtgtgctgaggagcacctgcagtcccagctactaaggaggctgagacaggaggatgaacccaggagtctgaggctgcagtgagccgtgatggcaccactgcactccaacctgggcgacagagcctgtctctaaaaataaaaaaagaacagtgtttcaccaattctcttagtctcagctgtcattttcttaaaaaaaatacaattttacacacagcagataagtacacacctgtaaaaacccacttagtgtgaattaaaggacattttaaatgtgcattaaatgtgaattaaaggacattttctagtggctaagagtcaacaacaacaaattaaatcaataaagtcaactgactataaatgccaactcagaggctggcctaaaagaaaatgccaactccatggcctggtgtgagcaagcaaaataacagcaacaatttgcaccctggtgatggacaaccttgcccagcccatcagcaattgtggagcctgctcctccactccagaagcctcgacccacagagaaagtttccaaagccagcacgggggtgccgcgggcacagagcgttctagttctcagcaaagaaaaaactcaaagggaagaacgtttgcaagaacatgcgcctaggccaatcgtgtctgggaccccccaaccacaaacagtgccatttgtagggtgtggggggaattgagggggacagtccatccccataaccgtacagtcctggttaaacacgctcagtgtgagggcctcatcatcaagttttttcgtgtttcatctttcccctttggagagtgtgaaatgagatagttttctcttccactggaaaatataaaattgaaaagcacgtcctcttcagattaagaaaagccagctggggccaggcgcggtggctcacgcctgtaatcccagcactttgggaggccgaggcgggcggatcatgaggtcaggagatcgagaccatcctggctaacacggtgaaaccccgtctctactaaaaatacaaaaattagccgggcgtggtggcaggcgcctgtagtcccagctactcaggaggctgaggcaggagaatggcatgaacccgggagacggagcttgcagtgagccgagattgcgccactgcactccagcctgggcgacagagcaagactccgtctcttaaaaaaaaaaaaaaaaagaaagaaagaaaagccagctgggcatagtggctgacacatgcaatcccagcactttcggaggccgaggcaggtggatcgctttgagctcaggagttcgaaactggcctaggcaacatggagaaaccccatctctacaaaaaatacaaaaattggcagggtgtggtggcatacacgtgtggtcccagctactcggagggctgaggctggaaaatcacttgaacccaagaggcaaaggttgcggtgagctgagatcgcgccactgcactccagcctgggtcacagagtgagactctgtctcaaaaaaaagaaagaaagaaagaaagaaaagccagttttctacagattggcgtaatgacagaggcacacttgttgatgtcacttacacaagaggaaagccctttcctcaccctctgatgagcggaggtgaggaggtagcagggccccagccctggtggtgccctgactgctgtcaccggccagtgggctcgagcaggcggctctgggccctgtgcctgtttcttcacccaagagacaaaacgttcccttctgtcaactaccctcaaagacagctggagagacagactgcgctcctggctgctgttccaagtacccagcctccaatcaacagatatcaccagcctactatgtgccaggagcccagatttcaggggctgggaacccagcagggagcaggaaagacagagctcctcgaccctcccggagcccatggtgtggcaatcataggacaaaatggtggctttggagcccatggtctgattcagacgcctgttctccatgggggtctgaccagttgttttacctctctccctctcagtttcctcatctagaaacaagcacagggacaatggcaccattgttggtcccacaacattccctcactcctgcatcagacctgtgccccaaatctctccccagggcccagagctgcctgcctgggcccactcactggtgagggcagtcagggtaccaccagggctggggtcccgttgccacctgttctgggagaccaggttaccagaatcagggaagtgggggggagggcatggtggctcacacctgtaatcccagcactttggggggccaaggtgggtggatcactagaggccaggagttcgagaccagcctggccaacatggtgaaaccctgtctctactaaaaatacaaaaatacaaaaaaattagccaggcttggtggtgtgcacctgtaatcccagctacttgggaggctgaggcagaattgcttgagcccagatggcggaagctgcagtgagccaagatcatgccattacactccagcctgggtgacaaagcgggactccacctcaagaaaaaataaagtaaaacaaagaatcagggaagtgggactctgagaaggcagagagggggccaggaagctgtgaagatggtggtgggagacagggcctgtgcaaagggtgggggcaggacactggtccacgcagtgtacagccagtcagagaggctgcacccagctgcttcctccaggcctgttggaacagaggagggaaaagacaaaaggaggcacaggcgccctcttcctcctgtcctttattcccagcccagtggaggtgattcatcccaccgctgtgggtgccacctgacttccacgagtgtgtcacactatgtcctaattttctgtgtgcctgggtgcccagctgcagttgagctgacctggagggtggggctcggttttatttatcttggtcccaagacagcacacagtagctcagcagacagaatctcatggtgccccagccccagagctggtcttctttttgactgtacctaaatgtggggtctcacgtggcttggagggtttcctgcaaagtgatgggttttgactcaactgacacagccacagcccaccaggctctgcccaccaggcactcccactgctgctgtcctggctccctgaaggtggcctcaacctgacggttgcagacactatgcctgcttcttccccctgcttcctctcccacctagaccctcacctgtccaaacagctaccccacatattcctttcacccccagccctttctactcttcctgaaacaacctcaggccaggttcctcttgatcacttcatgcccatatcacagagactgtctcggagctagaacccagctccaagcactccctgtgtaagcagccagatcatctaaaggtgtcactcctcaagaacctgccatagctccctactgcctctcataatgtggcccatgctactcttccctcaacagatgattgttgagcacctgagtgccagctgcagcctggcaaacaaggatgaataaaacaggcacagtctctgcccttgtggacctagtctaggtggttggggaagacagaccatcaatcaaccccgcaaagagaaaattataaacggctaaatggaaaaggtgtccatctccaccagtggtaacagagatgctgggccagtttgtcaggaaaggcttccctgaggaagtgatgccccagctgatatgaaaaggtgtagggattcaccagaggatgaagggtttggaaagagcattccagagagagggaatagcagatgcaaacgccttgaggcaagatgaaggatcgcctgcgcagatgacagaaagaggggccagggggccacagagcagagggaatgaggactgcaggcctgggaaacacggggagcaggtgtgctgtcagctgccggtagcagcgcctgatccagcctggctggtgtgcccaagaggaggagaagtgactttatgtcagcctgacctgcaggcagtcagtaaacagattctgttatcaggtctacattccacaccacaggcagtgcagatggaaatccgagacaaatgtctgtggtcatctgtgacctttactttcaccccaaagcttgtagtatcaagagctgggactcctatgaagggaaaagcccaaagaagctttaagagctaatggtctgcactccatgcaggagcaaacttcagggccaccactctgaccagcggtaaaacccagtccagcgcgaaggacagtgggcaggtctcagctcctcagcccccaccagccactggccactctctcggcaagcagacatcctgtcagttcggccgatttgtagcccagacacaaactctcacgtcttatttaccaaaagaccttcctcctctcatccctgagctgcctaaattaaaggaaggacatgaaccccaaagtcccagccgcatgttttggccctttgacctagacctgcagcctctcagctctggctcagtcctctttgcctccgtgtgaaaggctattccccatggcctagaccaggggtgtccaatcttttggcttccctgggccacactagaattgtcttgggccacacataaaatacactaacactaacactaacactaacactaacactaacactaatgatagctgatgagctttaaaaaattcacgggtgggcatggtggctcacgcctgtaatcccagcactttgggaggccaaggcgggcagatcacaaggtcagatcgagaccatcctgcctaaccagtgaaaccccgtctctactaaaaatacaaaaaattagccaggtgtggtggcgggtgcctgtagtcccagctacgcaggaggctgaggcagtagaatggcatgaacccaggaggcggagcttgcagtgagccgaaattgcaccactgcactccagcctgggcaacagagcgagacttagtctcaaaaaaaaaaaaaaaattcacaagaaaacctcataatgttttaggaaagtttacaaatttgtgttgggctgcattcaaagccatcctgggccacatgcagccatgggttggacaagcttggcctacaccaaacacgccctctcctccatacaaccatgtccaacacccaaatggaagccagtcatctgcccctcctgcagcttggaccacccgtgacctgagcctctgctgtgggccgggcctggacaactcaattctgcatgggccaggagcactgattaccactctggcagggaaacctttggattctcctaaagacaactggctgggagtggtggctcacacctgtaatctcagcgctttggaggcagaggcaggaggatcacttgaggtcaggagttcgaaaccagcctgggcaacatagcaagatcctgtctctacaaaaaaattaaaaattagccaggtgtggtgttgcatgcctgtagtctcagttccttgagaggctgaggtgggaggctcacttgaggccaagagtcgaggctgcaatgagctttgattgcaccactgtactccagcgtaggcaatagagcaagagcctgtctctaaaggaaaaaggaagacaataagcaggcctttccatgtccctctctaccttttaatgagatgagattaaagtaataaaataaaaactcagactacatgatatctaataactaggtataaaaacaaatgaggttaggagatgtcataaacttaaaaacaaacaaacaaaaaaataactttccaagacaagaaactatggtgcaatgaagaggcctgaacctgtgtcagaaaagccatgtctgcctgagctcactgggtacaaacttgggcaagggacgtaacaatctctggcctcactttatctattttttttttttttttttttgagacagagtcttgctctgtcacccaggctggagtacagtggtgcaatctcggctcactgcaacctccacctctcaggtccaagcaattctcctgcctcagcctcctgaggagctgggactacaggcatgtgccaccacgcctggctaatttttgtattttagtagagacagggtttcagcatgttggccaggctggtcttgaactctcgacctccagtgatctgcccttcctggcctccagtgatctgcccctcttgcccctatacactgaagataatactggccagagtgaccgggaggatgaaccaggcaatctatgatgttttctttactcagtccttccagcctggtggtgagacctttcctgacctccatcatcagatcggaacctgccctgctctactcatctcacagcatcaatccccaccgaatgcactacacattgggctcatttctttatatctgggcccctcccaacgatgtcagccccgtgaggcggcactgccttcagattcactgttccatccactgcccagaaagtgtccagcaaaaagaagatgccaaataaatactcactgaacgaacagtgtgatctacaaaaggcaggcatgagggccaggcgcggtgcctcctgcctgtaatcccagcactttgggaggctgaggcagacagatcacttgaggtcaggagttcgagaccagcctaggcaacatagtgaaactccatctctactaaaaatacaaaaattagctgggtgtggtagtgggcgcctgtaatcccagctactcaggaggctgagacaggagaatcgcttgaatccaggaggcagaggttgcagtgagccaagacagcgccattgcactccatcctgggtgacaagagtgaaactctgtctcaaaaaaaaaaaaaaaaggaaagcactgagagcacatgcgtcacacggcagggtcctgacactctactgtgacaaagcaggtcaagcgagtccacagtaccattctgcagatgagaaaactaaggtacagaaagtatttgcaggactgagggcagtgaaggaatatctgggaatccaaacaaacatctaaggacctaaacattgaaaagcaggcaccactgcacctgatggtgcctgcttttcttttcttttttttttttttgagacgtagtgtcactttgttgcccaggctggagtgtgcagtggagtgatcttggctcactgcaacctccgcctcctgggttcaagtgattctcctgcctcagggtcccgagtggccgggattacaggcgtccgccaggacgccaggctaatgttttgtatttttagtagagatgaggtttcaccatgttggccaggctggtctcaaactcctgacctcaggtgatccacctgcctcagcctcccaaagtgctaggattacaggcgtcagccactgcacccggcctggaaagttgttttaaagttcagaatggaggtggaggggtcttgcccagggagaatctatttagtcgaaaaaacaacaacaacaacaaaaacaaaaaaaaaacaggccagtgcaggtcaataagtgacagtcagggaattctggatctttcaggagtggattttactctaaaacttcgttctcatcaatttagactgcattgccattagcattctactaagatagactagcacttatttcagaggaagaaaagaaacaagggacaagaggacaagtaagtgtccgagccactcagcattcattccagacacactggccgggtgctgctctgggagaggtgcccagcaggccatctggaacagcagggctctgcggcaggaggacgcaggtgtgacctcagctctgcgcccaccaactatgagacttcagcaagttactctatttctgtgggtcttggtttcctcacttgtaaaaggggaataaaagcctcctagaatggaggcacctactgaaatacagcaaaagctcctggatgaagaacacataacaagggggaaaggaggaaggtgtagctctttgggcccagggcagtctctcctcatcactgagcccagttaccacgcgcttcctaggtacagcggtcacaaaagggacccacggaaggtacaagggagagaactctcattcgggtggggctaagggaggacaacacaggggaggcctcaaagaccgtccttcagggcaggcagcatacggcaggagctcacagtgatgttctagcaaccggagcaacacagctaaggatgctgaggctagaaagtgttgccaagagccagaagtgcaggaaagggacccagcaaggttaggtggagtcgattcagggcttactaaggtcatcaaagctgactttttttgagactgagtctcaccctgttgcccaggctggggtgcagtggcgcgatctcagctcactgcaacctccgccgcctggtttcaagcgattcttgtgcctcagcctcccaagttgctgggattataggcgtttgccactatgcctggctaacttttgtatttttagtacagacagggttttgctatgttggccaggctggtctcgagctcctggcctcaagcaatccatccacctcagcctcctaaagtgctgggattataggcatgagccacagcgcccagccataaactgagttcttttggaggaaggggaatgggagctgtgaaaggtttttggaacaggggaatatgttttagaagatgaatcctagccagatgcagtggctgacaccgtaattccaatactttaggaggctgagatagaaggattgcttgaggctaggggtttaagacctgcctaggcagcatagcaagacttcatctcttcaaaaaaaaaattgtttaattagctgggtatgattggtgctgcgctcctgtagtcccagctacttgagaggccaaggtgggagaattgcttgagcccaggagtttgaggttgcagtgagctatgatcctaccactgcactccagcctgggggacagagcgagaccctgtctcaaaaatcaaaaagatgacttccacagtggcgtgggattaagtgggagggagtgggcaagtaggaagtagaatggcccagaccactttggggcatggcaaggaaatggcccattccagagtccagcaggctggcagaggtgcaggagagagacaccttctggactctagaaggcaggtttgaagtcctctgcacagaagctccaggggagggagcgcacagagagataagatgcaggtagggaggctgaaattaggggacaagaaggagagactgaaaggagagaggatgaagagtgaagaccgacgggctccagtgttgcggagttcgaggaggatcggctgcagccacagggcaccggggttaaggacggaggggccaccggtaacctcggggagtacaaggaggaaagagatctggatgcatttccacggaaggctttttggaaagcagaagagagctgagcagggggacagggagacacacaaatcactgagatgctgttgggaaaaaaaaatcactcctaaagaggcagaggtgcagacctttcgaatttacgttgatattcagggtcagaaaagagtatataaggaaggagattctgagatgatgtcatggagtacagaacagactgaaaaagatgctgatgggaaaagtgcagacaggagtgggggtggagaaaacacacccctcctcccctaggctagcccgctgggttatccactttgctcaccttcacctggccatctgcttgccaagtgtgctctgtcacctaaatccaaccagatcacagccacctgctgcagggtgcttcccttttgcccccaaccaaaaattttggaattatacccttggttcccccagagttatctgtgaacccaagtgatctcctgagctagacagtaagggcctgggagggccatgcctcacacctgggccaacagtaacccatggtgtagattttcactcgagagcaagtgtaaagaagtgctgacatttccaaacgaagaaaaccaggccacgccttcattcaacaaatgtatagggaaaggaacaggaagaggctaagaagtcagtgacctggccaggcgcagtggctaacgcctgtaatcccagcactttgggaggccaaggcgggtggatcactcgagttcaggagtttgacacgagcctcgccaaaatggtgaaaccccgtctccactaaaaaaaaaatacaaaaattagccgggtgtggtagcacgtgcctgtagtcccagctactcaggaggctgaggcaggagaatcacttgaactcgggaggcggaggttacagtgagctgagatcatgccactgcactccaccctgggtgacagagcaatactccatctcaaaaaaaaaaaaattggacaggaagttttagaaagatccacgcctcccaaactgggagtgcttagtgctttctcatgaaatgatcttaggtgattttcccccgactcccgccttccccgccccccaccccctgactacatactctaaactgtagcacttagctattaacacctattatcggtaggacacttaacagtttacagagcactttcatgtcagtaacaagaacttgctaattaataatcaccgggttttagcactgttaacttagtgacagtgttgcaaattggctagctgtgcacttctctctccttggatcagctaaccagtcatgcaagcatgcaaccggcctatcaactctctttgggtttggaattcttaattgctgcggtctctactcccaaacgtccaaatctggcagagattaaatgatgacagtaattataggatcactgagtgcctctcatatgctaggcactgttctaagcgctttttcacgtgcttaattttcacataatcccaacacatttttatatctccattttccaaaggaagcaactgatgggtggaatggctaagagcttcaaccaaaggcacagagaaatcggggctggagccaagatttgaacacatgatctgaccctgtgtcctcactcttaatcaccatgctgtgctagatcattctagcaaaatgcttatatggtgctttgcacaacacaggtattcagcaaataaaggcagctgtgattagcataacacaggtagtttctagttcccacgagtgtcacctccaggaaagcagcgaccttgtctgtctggaagaatgcagcgctcccagcacctgacccaacgcacatttgagggatggatagaaaatgaatgaatgaaagtctctcccaaataacagagctgcctacgcatggctctttttcgcatgtctgtgtcgcgctatcgatactgccccttcataagcgcatcaggcgaatttgaggacacagagaggcgcccggagacgtacgatctgcgcccggtgcaggggtggcggaagcagcttccaaggaggcaggggatcagtctgagatcgcactgctgctgacgggtccgggctccggcgggaccctgcccgcccgggcgccgggaccggagggagacaaagactcgctgggccgccgcgccgacagaaacgctcgcacccctcgcccacccctccgggatgcagcccagcgcctccgcgggtccccggcctgggagcttcagcggcggcagggtccgggccctgggcggagaggacacgcgctgcgcacctcctcgcctcgccggtgcccgcgagggtcgctcgggcacgggaggccgcgggtcccggcctgtcaccttcagggccgcctgcccacccgcccgccgcaagcccttcagcacgcgccgcccccgccgccgcctggctgagtctcccagcgcctcagcctcgccgcaccgctcgcctcgcgccccgcaccccggcgccgcccccaggcccgcccggcccgtacctgctgggagagggggatgagcggcgccgccatcttcccgcggactcgggctccgagcgccgggggaacgggggcggggctgcagccacgcgtgcgcactgggacgacgggagggcggtgcgcaggccgcctgtcccgggagagggcggggccgtagacagggccacgcatgtgcagtcaggccgggaggggcgggggcaggggcggggccgcccacacgcagcctggaggggctgggcctgaggcatctgcgtcttccgtgctctcttgcccgttcccctactcctccttccaacgttgttcggactctcatgccgctggccgctgtccgagtcgaccatgctgtgtcatccctccagcccatgccgaggcctggttctctgttagggatgccgtccccctgccagtgcgcctggggaggcggtcgcccaccccgcggagggtcgggaccctcaccctgccccgcaaagcgccctgttcctaggatcgcagtgtgtgtgtgtgtgtgtgtgtgtgtgtgtgcgcgctaatttgggggacccgcaccctgcccccctcaccctgccccgcaaggcgtcctcctggctgtggtggcgggcacctgaaatccaagctactcaggagactgaggcaggagaattgcttgagcccaggaagcagaggtttcagtgagccaagatcacaccattgcaatccagcctgggcaacagaagcgaaactctgtctcaaaaataaataaataaataagacaagaacccacttgttgccaggtacagtggcttacacctgtaatcccagcactttgggaggccgaggtgggagggtcatgaggtcaggagttggagaccagcctggccagtatggtgaaacatcaatatggtgaaaccccatctctactaaaaaaaatacaaaaattagcaggtgtggtggtgcatgcctgtagtcccagctactcaggaggctgaggccagagaatcacttgaacccgggaggtggaggttgcggtgagccaagattgcaccactgcactccagcctgggtgacagagtgagactctgtctcaaaacaaagtcaaaaacaaaaagaacccacttgtaactgttgctaatcaaagcatacattcagggcaacttgaatctgtgtctcctggactgcggtcctcaaccttggcccaaactctctacttatattaactttgcctcagcttcttttgttacatcaatagagtaatgaaggtttttaacagtcttgagtgctttatcagtacgtattccataaggaaaagagaagtccttctaggtacttcaaacagaggatattgaatacaggggattgagccaggctctgtggctcacacttgtaatcccagcaatccagttgagacaggtagattgataccagcctggccaacatggagaaaccccatctttactaaaaatacaaaaattaacccagtgcagtggcaggtgcctgtaatcccagctactcaggaggctgaggcaggagaattgcttgaacctgggaggggaaggttgcaataagctgagaactcaccattgcactccaacctaggtgacagagcgagactctgtctaaaaaataaataaataaaaataaatgaatacataaacgactacaggggactgagtataaaagtgttggaagtactggaagaacaaaagaggaaggtaagtttacctaaagattcataactatatgaggctgctagcctctctagagctgaaagattaaagcaggggaggtggctgggcatagtggctcacgcctgtaatcccagcactttgggaggccgaggtggatggatcacctgaggtcagaagtttgagaccagcctggccaacatgatgaaatcccgtgtctactaaaaatacaaaaattagccggttgtggtggtgggcacctgtaatcccagctactcgggaggctgaggcaggagaatcacttgaacctgggaggcggaggttgcagtgagctgagatcacgccactgcactccagtttgggcaacaagagcgaaactccgtctcaaaataaataaataaataaagcacaggaggacccataacccacaatcactgtgcctacagaaggatcccagatgtgttcacccttgctagccacagttgcctccaccatgattgcgaaagtcacagttgttgttgtcaccaccacctaagccactggcagaagtctgaaaaaatggtttctcccctctttctgcctcccaactttgttctaataaagcatgacaggaacgttgccaattggcaacggcgtccaggaaatgtagcatgcaggctttaagtgccagtatcagagtctagaatggtggtggccatagaaactctccagcatcatcttgtaaaaataatccaaacttggctgggcgcggtggcccacacctgtaattccagccctttggagggccgaggcaggcagttcacgaggtcaggaattcgagaccagcctggccaacacagtgaaaccccatctctactaaaaatacaagaattagccaggcgtggtggcgggtgcctgtaatcccagctactcgggaggctgaggcaggagaattgcttgaacctgggatggggaggttgcagtgagccaagatcgcaccattgcactccagcctgggcaacaagagcaaaactccgtctcagaagaaaaaaaagaaaaaaaaaaaggccgggcatggtggctcacgcctgaaatcccaacactttggaaggccgaggcaggcagatcatgaggtcaggagatcgagaccatcctggccaacatggtgaaaccccatctctactaaaaatacgaaaatttagccgggcatggtggggggtgcctgtagtcccagctacttgtgaggctgaggcaggagaatggcatgaactcaggaggcgggtcttgcagtgagccgagatcgcgccactgcactccagcctgggcaacacagaaacttcgtctcaaaaaaaaaaaaaaaaatccaaacttaatcatacacttttgaaccctaagaattatgttgagccttgaagaaaacgggactgtgtgatctgagccagacagcatgtaactacaacttctgcttatagattatagattaactctcctgttcttgctctgtagattcatttcaagactaaatggcatcagcgttaagatcgcccttcttcattgctgacctttcctctattatcttgcacctaaatcagaccagatagtgcaaaaggtcctgtgactgttatgtcctctatgtgaatgttaaatatacccttcccaaaaagaccactgccttgactaatcagattactgttaactatgtacttgccttgtgtgaaatatgtagaaacgctgtcaagcttcccaaaccttacctatataaatgacccccaaacttcctcagtttggaatgctgatttccattctttggaatctgtgttccagggtggccgtcctcaaacttttgtgctaaactaaactctatatttaaccatatttcctgaatttatttatttagggttgatgttttgatgatccagatgggatctgaagtggagttccagtgatccctgccacttctcacaatcagaccctttgtactgttaccgcaaaggggtcttgatccagaccccgagagggttcttggatctcacccaagaaagaattagtgcgagtccatacagtaaagtgaaagcaagtttattaggaaagtaaaggaataaaggaatggctacttcatagagcagccccaagggctgctggttgctttttttttttgggagaagtttcactgttgttgccagggctggagtgcaatgacgggatctcagctcaccacaacctccacctcctgggttcaagtggttctcctgcctcagcctcctgaatagctgggattagagacatgcaccaccacgcccagctaattttgtatttttagtagatgtggggtttctccatgttggttaggctggtcttgaactcccaacctcaagtgatccgcctgcctcggcctctcaaagtgctggaattacaggcttgagccactgtgcctggccaggttgctcatttttatggttatttcttgatgatatgctagacaaggggtggattattcatgccttccctttttacttatttatgtatttatttatttattttttgagacggagtctcgctctgtcacccaggctggagtgcagtggcgcgatctcggctcactgcaagctccgcctcccgggttcacgccattctcctgcctcagcctcccgagtagttgagactacaggcacccaccaccacgcccggctaatttttttgtatttttagtagagacagggtttcactgtgttagccaggatggtctcgatctcctgacctcgtgatccacccatctcagccttccaaagtgctgggattacaggcgtgagccaccgcgcccggcccccttttcaggctgccatatacagtaacttcctgatgttgccatgacctttgtaaactgccatggcgctggtgggagtgtagcagtgaggaccaccagaggtcactcccatcactatcttggttttggtgggttttagccggcttctttactgcaacctgttttatcagcaaggtctttagtgctgacctcctatctcatcatgtggctaagaatgccttaaccgcctgggaatgcagcccagtaggtctcagccttattttactaagcccctattcaagatggagttgctctggcagctacctgatttatgaattgttctttgctcagttacactccatgaaatttaatatgtccagagtttttcctctaacaaagtttaaagtgaagttaactagaatgaaataagattaaaaagtcatttcttggtcccactagccacatttcaagagctcaatagcaacacgtgacccggcatggtagctcacgcctgtgatcccagcactttgggaggctgaggcacgcagatcacttgaggtcaggagttccagaccagcctggccaacatggcgaaaccccatctctactaaaaatacaaaattcagatgggcatggcgcatgcctgtaatcccagctacttgggaggctaaggcatgagaatcgcttgaacccaggaggcagaggttgcagtgagccatacttgcgccactgaactccagcctgggcaacagagcaagattctgtctcaaaaacaaacaaacaaaaaaagcaacatgtgacaaattctctcggacaacgctgctcccaacgaatcttcagagcctgagccagtctcactcaccgttttttgtcttgttagctccactttattttatttttagagagggggtctcgctctgtcactcaggctggagtgcagtggcacgatcatagcccactgcagccttgacctcttggactcaagcgatcctcccatctcagcctcccaagtagctgggaccacagtcatgtacctccatgcccagctaattacaaaaaaaattttttttagagacaaggtctctatgttgcccaagctggtctcaaactcctggtcttaagtgaccctccctccttgaccccccagatagctgggattacaggcacaagccactacacctggcctgactcacctttgtacactaattggtaccagcactttctctccaggtctgcctctgattcttttcacactactcaccctgttcagaggtgaaagaggtaggcaatgtttgccacccttgcattaggaggaagggagtctttagtttctcagagtaataatcaatccctaataattggtgaaggttgatgtagccaccatcagaaaaaatccaggtgcaaaggtctgccaacattgaccagagtgagagcaaaattctgcagaacttcacttcccagccaggcttttgaaactgatcaactttcttttttttcttttcttctttctttctcttttttttttttttttttctgaggtagggtctcattctgtcacacaggctggagtgcagtggcacaatctcagctcactgcaatctccacctcccaagctcaggtgatcctcccatctcagcctcccgaatagctgggaccacgggtgtgcaccgccaaacccagctaatttttagtattttttgtagaggcagagtttcgccacattgcccaggctggtcttgaactcctggactcaagcaatttacacacctcagtctcccaaagtgctgggattacaggtgtgagctactgcacccggcccacactggtcaactctcaatattctgtatataaattccaatttatttggcttattcataacatcactagattccaaatttctggtgtcacaaatttgattattttcatcatgagtttcagtatgattatgggcctcttccagaagaagactgggccaggagcagtggctcacacctgtaagcccagagctttgagaggccaaggtgggaggatggcttgagtccaggagttcaggaccagcctgggcaacatgtgagactcccatccctataaaaattaaattaaaaaacaaaaaatatggctggctgcagtggttcatgcctataatcccagcactttgggagaccaaggcaggcggatcacgaggtcaagagatcaagaccatcctggctaacacagtgaaaccccatctctacttaaaatacaaaaagttaaccgggtgtggtggcgggcgcctgtagtcccagctactcaggaggttgaggctgcctccagcctcagcctgaagtacctgggactacaggtgcgcaccaccacatccagctcctttttgtatttttagtagagacgggttttcactgtgttggccaggctggtcttgaactctgggctcaagtgatccgcccacctcagcctcccaaagtgatgggattataggcgtgaggcacactgcctggtcaacttttattttataaaaagacttttgggagttaagaaaaggggatcatggttttggccagacccttgctggcctctggcttccagtgtgtaaaattgtcaagagggaacttctcagtgcaagggggtcaccaggggagatacaacctaccccacccagaagcatgaaacactgttcaaagaaaattggacaaagtgccatgtagacatttgagtttgaaacatagattaaagtagcaatgagattttaccagtcatccttatatccaatggggatcactaaagttcattccttctgtgaaattgattgaagtaatgttcgtgcctgttaatttttcccgacagcagctcttcctcctcttcctcgcgggccttcttcatttcctccttggcctgtatggcatccatctccctttctggaccctggagaaagaaagaaaaaacataagccccaccgggtgcgatggctcgtgcctgtaatcccagcactttgggaggccgaggcagatggatcacgaagtcaggagatcgagaccatcccggctaacacggtgaaacacagtctctaccaaaaatacaaaaaaaaaaaagccaggcgtggtggtgggcgcctgtagtcccagctactcgggaggctgaggcaggagaatggcctaaacctgggaggcagagcttgcagtgagctgagatcactctactgcactccatcctgggcgacagagcaagactctgtctcaaaaaaaaaaaaaaagcaaaaattagctgggcgtggtggtgtgtggctgtagtcccagctgctcgggaggctgaggtgagaggatcatttgaacctaggaggcggaggttgcagtgagtcgagatggcaccactgcactccagcctgggtgacagagcaaaacccgtctcaaaacaaaacaaaacaaaacaaaacaaaaaaagccccagaggccaggggttatgcttccatgtggccaaatgcatgtcagtactcaggcagaccctgccttctagaagcctcctcaccacctaggataggctgaataagaagaacctgtaaagattgcatgtcctggctgggcgcggtggctcacacctgtaatcccagcactttgggaggccgaggcaggcagatcatgaggtcaagagagcgagaccatcctggccaatatggtgaaaccccgtctctactaaaaatacaaaaattagttgggtgtggtggcaggtgcctgtagtcccagctactcgggaggctgaggcaggagaatcgcttgaaccgggaggtggaggttgcagtgcgccgagatcacgccactgtacttcagcctggcgacagagcgagactccgtctcaaaaaaaaaaaaaaaaaaaaaaaattcatgtcctaatccctggaacctgccaatattaaccttacatggggccaggcacagtggctcactcctgtaatcccagcactttgggaggccaaggcaggtggatcacctgaggtcaggacttcgagaccagcctgaacaatatggtgaaaccccctctctactaaaaatacacaaattagccggacgtggtggcatgcgcctgtagtcccagctacttgggagtctgaggcaggagaatcgcttgaacccgggaggtggaggttgcagtgagccgagactatgccactacattacagcctgggtgacagagctagactccatctaaaaaaaaaaaatttacacaaatgaaatagtgatgtaggaagagttaatcacgtgcttcataccttggtttcgccccaggtggccttgccaaaattatctgcgtactcttcatcatctgtgatcagaaagttatcaaaaatggttccagatctcacctgcagatgaaaataaggccttcattattatgcttttattctttattatttgtttatttttcatttcttttttcctttggaaatacatgaagctcaggtgacattttttattttttagagatggggtcttgctatgttgcctaggctggatttgaacttctgggcttggccaggcgtggtggttcacacctataatcccagcactttgggaggctggggcaggtgaatcacttgaggtcaggagttcaagactagcctggccaacacggtgaaccccatctctattaaaaatacaaaaattaccaggtgtggtcgtgcatgcctgtagtcccagctacttgggaggctgaggtgggaggatcgcttgaacccgggaagcagaagctgcagtgagttgagatcgtgccactgcactcccgcctgggtgacagagtgagactcagtctcaaagaaaaaaaaaaaagaactgggctcatgtgatggtcccacttcagcctccccagtagctgggactattacaggcgtgagccatactgtccctggctactaggccttcattattgatgtgacatatgtaacaacttttcaaaaagaaacagttgtattttgctcagtagtgtatactataacagcaattagaatagtaggtggtgcttaaacccatttctagaatatcctttccctctaaggcactggttccttaaacgtggctgcacatcgggatcaccaaaactttttttttttttgagacttagtctcgctctgttttttttttttttttttttgagatgaagtgaagtctcactctgttgcggaggctggagtgccgtggcgcgatcttggctcactgcaacctccacttcctgggttcaagtgattcctcccaggattaagttattctcatgcctcaccctcctgagtagctgggactacaagcacgcaccaccacacccagctaatttttgtatttttagtagagacgaagtttcactatgttgcccaggctgctctcaaacgcctgagctcaggcaatctgcccccctcagcctcccaaagtgctgggattacaggcatgagccactgagcccagctgggatcaccaaagcattaaaacaaaaaaacaaacaaaactctcagcactttggaaggctgaggtggaaggactgcttgagcctagaagttctgagactcccatctcttttttttttttttttttttgagacggagtcttgctctgtcacccagactggagtgcagtggcccgatctcagctcactgcaagctctgcctcccgggttcacgccattctcctgcctcagcgtcccgagtagctgggactacaggcgcccgccaccacgcccggctaattttttttgtatttttagtagagacggggtttcaccatgttagccaggatggtctcgatctcctgaccttgtgatccacccgcctcagcctcccaaagtgctgggattacaggagtgagccaccgcgcacagcctagactcccatttcttaaaaaaaaaaaatctggatgtggtggcttgtgcctgtagtcctagctacttgggaggctgaggtgggaggatcgcttgggcctagtttgaggctacagtgagctaggatggtgccactgcactccagcctaggtgacagaatgagaccctgtctcaacaaaacaaaacaaaacaaaacaaaacacacacacgcaaaaaatctaaagtaaagttaaaaccaaatgacctgccaaagctccaggccaatggcaccaatgttctcaaattctgagaggtcatactgcgtcaaatagtcggtattcttcatcttacggtggagccagacgtctttatgaataccttctggtttcaggccatcctgtatcaaaaaaaccatatggggtggtctcaatgacatgggcagcggaggggcagccctggggcatccctggcatcatacaaagaggccacacacctggtacgggggcttctggagcatcggcgctggccagtccccatccaggtcaccgttccagtcgctctgcttgctggtgctggcgtccagaaaatgcttctcccagtccttcaaagacatgtaaggaaaaagtaaaatcagtcagatgctcatatatttgttgttgttgcttctgtttttgtttcttgagactaggttttgctctcacccaggctggagtgcggttgtgcaatcatggctcactgcagcctcaacctcttgggctccagtgatcctcctgcctcagcctcccaagtagctcggactacaggcgcccgccatcatacctggctactatttttatgttttgtacagtcagggtctccctctgttgcccaggctggtctcgaactcctgggttcaagcgatcctcctgccttgacctctggaagtgctggtattacaggcattagccaccacacccagccagatgctcagatttgagaaaggaaattattagatgccaagtggcaggcacaggctggtgacccctgtcccagtgtccctctcccttcttcagtttggtggtcaggaggccaagtgcttggtgcttccaatcccactgaggacttcagggcaacaccacactgcctagatttttctccctaacctgccatatgactttagccctttcctgcatgctatggagaggagcagcggtgtggaaacctcaagtagtggctagagtgaaaaatgatggtgcaaaaagtgatggtgatggccagatgtggtggctcacacctgtaatcccagcactttgggaggccaaggcaggcaaatcacttgaggtcgggagttcgagactagcctggccaacatggtgaaaccccatctctactaaaaatacaaaaattagccagggatggtggcgggtgcctgtaatcccaggtattcgggaggctgaggcaggagaatcacttgaacctgggaggcggaggttgccgtgagctgagatcacgccactgcactccagcctgggcaagaagaacgaaactctgtctcaaaaaataaataaataagtaaataaataaatgttttacgataccttcagatgtgtagagatgtggctggtctgcagtgtgtgctctggggagggcatttggttctataatattgccatcgtggctaccagccatgcagcaattgtccagtaactgggtacttacaaactacatttgtgcactttttagagttgcccaggaaaaattcacacctgggctttgttgtctttagtctgttcccaatccttcgattctgccggggacgtttccttcttgagtgatgttaagttccagtcgtactctatgctgccggattcaattgactgaccatcaattttcacatcataagaaagatctggtcttaaaattagagtgtacaggtgtgtgaagccatcaacctgcatattttagggggaaaagcgtaacaattaaatcctcaatttcttttttcttttcttttctttttttttttttttttgagatggagtctcactctgtcgcccaggttggagcgctgtggcacaatctcggctcactacaacctccacctcctgagttcaagcgattctactgcctcagcctcctgagaagctgggattacaggcacctgccaccatgcctgggtaattttttgtgtctagtagagacagagtttcaccatgttgaccaggctggtctcgaactcctgacctcaggtgatccacctgcctcagcctcccaaagtgctgggattacaggcatgagccaccacgcccggccaactctcgatgttttaatgcaagtctaaatatgcagtttatttttatttttatttttttgagacagggtcttgctctgtcacccaggctggagtgcagtggtgcaatcagagctcactacaaccttgacctcccaggctcaagtgaccctcccacctcagcctccccagtagctgggaccacaggttcctggcactacacctggctaatttttgtattttttgtcatgacaagatttcgccatgttgcccaggctggtcttgaactccttggctcaagcagtcctcctgcctcagcttcccaaactgctgggattacaggtgtgagccactgcacccagacatttctccagaatgtttttttcatcctgaatatttcattcattaatgaggatggatgtggctgaaatgtgactgtactattgtaaccctcatagggcaaatgatgacatgtcatagctcacagtaaaaaatgagagtgccctcctgatggggtaaaaacttcaggaaaccagttaaaggagagaagtatctccaatgggccccctaaactggaaactggaaacaggaggtatgtctacaaagacccatccctggctcagttaagtattttattatcaaaactattttttctaaacttagtctggcaggagttaacactcatttatttgaatacaagagcagttaccttacacctgatcagtttcttgttttcgtgatacttattcttgaaatgtaaaataacatgaactttcttgatatcaaatccacaaatatcgggtcctacaaaaaagattagctgctctcaatttctttccataatgcatcaccgtagaataaccaacccacaaccattctttttttttttttgagacggagtcttgctgtcacccaggctggagtgcagtgatcttggctcacggaaacttctgcctcttgggttcaagcaattctcctgcctcagcctcctgagtagctgggactacaggcgcatgccacgatgcccagctaatttttgtatttttagtagagatggggtttcaccatgctggccaggctggtctcaaactcctgaccttgtgatccacctgcctcggcctcccaaagtcctaggattacaggcttgaaacaccacgtgcagtccattcttcttacatataatcagatattcacactaagatatttatttatttatttgagacagagtctcactctgtcgcccaggctggagtgcagtggtgggatcttggctcactgcagtctccgcctcccgggtttaagtgattctcctgcatcaacctcccgagtagaatagctgtgattacaggcatgtaccaccaggcccagctaatttttgtgtttttagtagagacaggttttgccatgttggctaggctggtctcaaactcctgacctcaagtgatttgcctgccttggcctcccaaagtgctgagattataggtgtgagccactgcatctggtcacatgtgtgaatatcttattattgttgttaaaggacaatgtcctggctttccactcacttttgagtgtgttctgaagcttatttaaatattcaaagtggcctgctaatcccagcactttaggaggccaaggtggggagatgacttgaggccagtttgagaccagcctggccaacatggtaaaaccccgtgtgtactaaaaatacaaaaattagctgggagtggtggcgtgtccctgtagtcccagggacctgtgaggctgaggtgaggggatcacttgaacccaggaagtggaggttgcagtgagctgagatcgggccactgtactccagcctgggtgaccaagcgagactccgtctcaattaaaaaaaaaaaaaaagtgtgggctgggcatggtggctcacggctgtaatcccagaactttggggggctgaggcgggtgaatcacgaggtcaggagttcgagaccagcctgactaacatggtgaaaccccacctctactaaaaatacaaaaattagccagccatggtggcacacgcctgtaatcccagctattggggaggctgaggcaggagaatggcttgaacctgggaggcggaggttgcaatgagccgagattgcaccattgcactccagcctgggtgacagagcaagattctatctcaaaaaaaaaaaaaaaaaaaggtatttacacatgtaatggatgttcatgaggaaatgtagacagatgggctctgtgttgcctgtctgaggttttatgcataacttatgcataggaattcatgcaaatgtcaagactgacaataactgtgcttcccttgtcctcctccttaacccctcaccctcagcaagctcccctcacactaatggctggcgctgactcattgcaacaaagtgtcccaatagtaacagagtgggtttgagtaaaatggaactgttgaattaaaaactgaaatactaagaaaaatttattttaatctttttttgaccccaaattatgctgcttggcaattcagatgtagtagacacatgctatataggggtctttatttatttatttatttatttcggacagggtcttattctgtcatccaggctggagtgcagttgtgtgatcatagcttactgcatcctcaaactcctcggctcgggggattcccctgcttcagcctcctgagtagctagaaccacaggggtgcgccacctcactgggttaatttttaaaattgttgtagagatggggccaggcgtggtggctcacgcctgtaattccagcactttgggaggccaaagtgggtggatcacctgaggtcagtaggtcgagaccagcctgtccaacatggtgaaaccccgtctctacaaaaatacaaaaaaattagctgggcatggtggtgggcacctgtaaccccagctacttgggaggctgaggtaggagaatcgcttgaacctgggaggcagaggttgcagtgagccgggatcgtgccgttgcactccagcctgggcgacgagcgaagctgtgtctccacaaaaaaaaaaaaaaaaacattttgtagagatggggtcttgctatattgcccaagctggtctcaaactccggggctcaagtgatcctcccttgatgtttcagatatctgggtgttttttagttctatttttatttttattttgtattttgtatcatttatttatttatttatttgagacggatttttgctctcattgcccaggctggagtgcaatggtgcaatctcggctaaccataacctctgcctcccaggttcaggtgattctcctgcctcagcctcctgagtagctgggattattacaggcatgcgccaccacgcccagctaattttcaatttttttttttttttttgagacggagtctcactctgttgcccaggctggagtgcagtggcgtgatctcagctcactgcaagctccgcctcccaggttcaggccattctcctgcctcagcctcccgagtagatgggactacaggtgcccaccaccacacctggctaattttttgtatttttagtagagacggggtttcactgtgttagccaagatggtctcaatctcctgacctcgtgatctgcccacctcggcctcccaaagtgctgggattacaggtgtgagccaccgcgcccggctctaattttgtatttttaatagaaacggggtttctccatgttggtcaagctggtctcgaactcccgacctaaggtgatgcgcccgcctctggctcccagagtgctgggataacaggcgtgagccaccgcacagagccctaatttttattttttgtagtgacagggtctcactatgttggccaagctggtctcgaactcctggactcaagtaatcctcctgcctggcctcccaaaagtgctgggattacaggcataagccactgtgcccagctgaggatgaatattttggaagtacattcattctttttttggagatggagtctcgttctgttacccaggctggagtgcagtggtgagatctcggctcactgcaacctccacctcccaggttcaagcaattctcctgcctcagcctcctgagtacctgggactacaggcatgtgccactatgcccggctaattttttttgtatttttagtagagatagggttttaccatgttagccaggctggtcttgaactcctgaactccagtgatctgcccaccttggcctcccaaaatgctgagattacaggtgtgagccgcgacacccggcctgaggtacatttattattaaagttttaagttacactatacttaggtctatttcctgtggcccagtgtggtcccttcccagttctagcacaaattttaatcaagtacccctgttgtcaggagacatttaatattttctagaggtttgcaggctttttctataaaggccagatggtaaaatatttttggctttgtaagcctaatgatctctgtcatgacaacttaactctgccactggtactggcgagcagccacagacaacatataaatgaacagagtgaggctgcattccagtaagacttcatttatgcacactgaaatctaaatttcatataattttcatgtatcacaaaatatcatcttgtattgattttttccaaccagttaaaaacgtaaaaaacatttttagttcacaggttatataaacacaggcagtgggccaatttggcccacggccaaggtttactgagtactgaaggattcaaaacacaggttgaggccaggcgtggtggctcacgcctgtaatcccagcactttggaaggccaaggtgggtggatcacctgaggtcaggagttcgatacctgccaggagttcgagaccagcctgaccaccatggtgaaaccccatcttggccgggtgcagtggctcacgcctgtaatcccagcactttgggaggctgaggtgggcggatcacctgagatcgggagttcaagaccagcctgaccaacatggagaaaccccgtctctactaaaaatacaaaaattagctgggcatggtggtgcatgccggtaatcccagctacttgggaggctgaagcaggtgaatcccttgaacctgggaggaggaggttgcagtgagccgagatcatgccattccactccagcctgggcaacaagagcgaaactctgtctcaaaaaaaaaaaaaacccatctctactaaaatacaaaaaaattagccaggtatggtggcacatgcctgtaatcccagctactcaagaggctgagataggagaatcacttgaacccaggaggcggagattgcagtgaggcgagatcaagccattgccattgcactccagcctggttcacaagagtgaaaactcgggctcgaaacaaaaacaaaaacaaaaacaaaaacaaaaacaaaaacaaacaaacaaaaaaactacacaggttgagcatcccaaatcaaaaaatcgcaaatctgaagtgttccaaaacccaaaacttttagaatcaacatgatgctcaaaggaaatgctcatcagagcattgtggatttcagatttttcagattagcgttgttcaaccagtaaggataatgcaaataatccaaaatccaaaaaaaatttccaaaatccaaaacactctggtcccaaacatttcagataaggtatccttaccctgcatgagggcaacattaatggtgaataaataacttcttcaggaacacaacagactggtacagttgcctttttatattaattaggcttaatagtgcttggatccgatacactcaatactactacaaaccttggatccgatatactcaatactactaccttcactacattagcaaagtcttagtctaaagatcctgtgaagtgggagggttttcaaagtcactagaagtggttgtgttgcaccacgtaaactcaccaaacataatatagtactgcgattttccattcaggttcttctggtcaatgtctgcaggaaagaccttaatgtagccccctccacagtccatcttctgctcatgttttactgtgtactgaataaccagagttttccctttattgctgaacggtttgaagcgtgcagagatggcatagaatcggccattctgagtggtttgcagacctttgaacaaaatatactcatgaaggatcaggaatgacgctgcgctaagtaacgcaggaagttaaatcgatgtccttcccttactcccaaacataaatgtcctaaccatttacagtgatctacagtgccaacagagcattatacaataatgcataatgggtagaccactagcaggcactctgcttctatataattttttttttttgacatggagtctcactctgtcgcccaggctggagtgcaatggcgtgatctcggctcactgcaacctccacctcccgggttcaagtgattctcctgcctcagcctcctgagtagttgggattacaactacaattagccaccacgccaggctaatttttgtatttctagtagagatagggtttctccatgttggtcaggctggtcttgaactcctgacctcaggtgactgcccgtctcagcctcccaaagtgctggaattacaggtgtgagccagcgtgcctggcccatacaacttttatttcacacacctggaagtttttgttcttaatataccactgttcttaattagttaattaattattttttgagatggagtctcgctctgtcgcccaggctggagtgcagtggcacgatctctgcccactgcaagctccacctcctgggttcacgccattctcctgcctcagcctcccgagtagctgggactacaggcgctggccacaacacccagctaattttttgtatttttagtagagacagggtttcaccatgttagccaggatgttctcgatcccctgacctcatgatccgcctgcctcggcctcccaaagtgctgggattacaggcgtgagccaccgtgcccgactggtccctttcctaaacattctactctgccttttcagcataaaaggcagccatagacaatatataaatgaatggactgccaggcatgctggctcacgcctgtaatcccagcactttgggaggctgaggcaggcggatcacggggtcaggagtttgagaccagcctggccaacatggtgaaaccctatctctactaaaaatacaaaaattagcggggtgtggtggcatgtgcctgtagtcccagctactcaggagagtgaggcagaagaatcgcttaaacccaggaggcggaggttgcagtgagccgagattgcaccgctgcactccagcctgggtgacagagtgagactccgtctccaaaaaaaaaagaatggatgtggctgtgttccagtgaaacttaatggacactaaactttctttctttcttttcttttttcttttgagacagaggctcgctctattgcccagactgaatctctgctcactgcaacctccgcctcccaggttcaagcgattctcctgcctcagcctcctgagtagctgcgactacaggcgtgcgacaccatgcctggctaattttcatatttttagtagagatggggtttcaccacgttgcccaggctggtcttgaactcctggcctcaagtgatccactcaccttggcctcccagagtgctaagattacaggtgtgaaccactgtgcctggcctaaactttcacatatgtgaaagcaaatacaatttaaagccttgagaggccaggcatggtggctcacatctgtaatctcaacactttgggaggctgagccgggtggatcacttgaagtcagaagttcgagaccagcctggccaacgtggggaaactccatttctactaaaaatacaaaattagccgagcgtagtggcgcgtgcctgtggtcccagctactcgggaagctcaggcagctgaactgtttgaacctgggagatggaggagccattgcaccccagcctgggtggcagggcgaaactccgtttaaaaaaataaataagccagacgcagtggctcacgcctgtaattccaacactttgggaggccgaggcgggcggatcacctgaggttgggagttggagaccagcctgaccaacatggagaaaccctgtctctactaaaaatacaaaattaggccgggcgcggtggctcatgcctgtaatcccagcactttgggaggccgaggcgggaggatcacgaggtcaggagatcgagatcatcctggctaacacgtgaaaccctgtctctactaaaaaaaaaaaaatacaaaaaattagccgggcgtggtggcaggcgcctgtagttccggctactcggcagaagaatggcgtgaacccaggaggcagagcttgcagtgagccgagatcgcgccactgcactccatcctgggctacagagcgagactccgtctcaaaaaaaaaaaaaaaaaaattagccaggtgtggtggcacatgcctgtaatcttagctacttgggaggctggaagcaggagaatcatttgaacctgggaggcggaggttgtggtgagcagagatcacgccattgcactccagcctgggtaacaagggtgaaactctctctcaaataaatacataaaataaataaaaaccttgagcaagttgtgtgatctgagtcatgcagcatgcaggtgtaacctctgcttcttaaatcatagataaaccttcttcctcattgttcttgtttggcaaatgactaggacaaaccagagaccaggcctcctctatttgtgaccactgaccttagttacagattaactgcctccaggactgacctgtacctaactcagaccagatggcacaaaagatgccgtgactgttacatcttcagggtgaaatgttaaatataccttctcaaaagaaaaagaccaccttgactaatgggatcatggtcattatctatcaagccttgcctagaaagatgctgaaattctgttaagcttctctaaactttgtctatacaaatgatcccaaacttctacacttcagaacactgacttctattctttgggatctgtgttttccacacagttgtccttaaactttgagcttgaattagctctcttgaagctagaatttttttttttttttttttttttttgagacagagtcttgctctgttgcccaggctggagtgtagtggcacgatctcgactcactgcaacctccgcctctcgggttcatgtgattctcctgcctcaatctctcaagtagctgggactacaggcctatgccaccatgctcggctaatatttgtatatatatatattttttttcttgagacagagtcttgctcggttatccaggctggagtgcagtggcatgatcttggctccctgcaacctccgcctcctgggttcaagtgattctcctgcctcagcctctgaagtaggtgagattatagatgtgtgccaccatgcccagctaatttttgtatttttaatagagacggagtttcgccatgttggccgggctggtctcaacctcaagtgattcgcttgccttatcttgacctgcctgtacaaaagtaaaagctcattgtgttgtaccctgaagaatgtgcaggcgacaagatgtaatgtttatctctgtatttttttcttttattttttgaaatggagtctcattctgtcacccaggctggagtgcagtggtacaatctcagttcactgcaacctctgcctcctgggtacaaacgattcttctgcctcagcctcccaattagctgggattatagttgtgcgccaccacacttggctaacttttttgtatttttgtggagacagggtttcaccatggtgaccaggctggtctcaaactcctgacttcaagtaatccgcctgccttggcctcccaacatgctgggattacaggcgtgagccaccgtgcctgaccatatttttctttttttttgagatggagtctcactctgtcactgaggctggagtgcaggggcatgatctctgctcactgcaacctctgcctcccgggttcaagtgattcttctgcctcagcctcccgagtagctgggactacaggcatgagccaccacacccagctaatttttgtatttttagtagagacagggtgtcaccgtattggccagactggttttgaactcctgacctcatgatccgctcgcctaaggcctcccaaagtgctgggattacaggcatgagccaccgcgcctggcctatttttctttttaatacgaaaattaaaatgagaaaaagtacccactaaccttttccttctgaggggcatggcccttgatcctcaaatgcacttgactagtgtctattaagaggggcaattttggtaatgcctactaataacacattcatataaatataatccaaagaaggttaaataccattgcatatttgacagtgcttcaagtatgattttattataccaaataagctgaatatgtctccttggacttcaggggacctaataccaataaaagtaataataatgataataggccaagcaccatggctcacgcctataatcccagcactttaggaggccgaggcaggtggattacttaaggccaggagtttgagtccagcctgggcaatgtggtgaaactctgtctctaaaaaaattagcagggcatggtggcgcacgcttgtaatcgcagctcctcagaagcctgaagcaagagaatcacttgaacccgggagacggaggtttgagtgagccaagatcgtgccactgcactctagcctaggcgacagagcgagactcctactaccaaaaaaaaaaaaaaaaaaaaaaaggaatctttggcaataaagaaaggagagaggaggctggatgttgtggctcatgcctgtaatcccagcactttgggaggccaaggtgggtggatcatgaggtcaggagttcgagaccagcctggccaacgtggaccctgtctctactaaaagtacaaaaattagccggtcatggtggcgcgcgcctgtagtctcagctactcgggaggctgaggcaggagaattgcttgaacccgggaggtggaagttgcagtgagccgaaatcgcgccactgcactccagcctgggcaacagagcaaggctccgtctcaaaaaaaaaaaaaaaaaaaaaggagagaagaaacaaaaaaacaaggaaaggagccccttaagttctacctttgccttaatgtcttcatctgtaaaacgggaataaaagcgttttggctgtgccacaactacctagagaggttgctatggaaatgtaacattaggctcaatttggtcctgattctacactaacctttatctttctctttatgaccataaaacttgcccgacgaaagtctaaaatgcccaaatcgggagtcattggtggactgcaaccatcggtttctccaatgctctgtggggaaggggaaataacaccggttagaggtgataatggttaatttgggctaagggaagggtgaaggggaccctcgaggattcgagggttcgctgccgtggaccccgtggcgactctggccagccttagggggcggagatgggggagcttacacctccgccaccacgggcgtggccccttcacctccgtctagaaattcctcttggaaatagacggtagccagcgccactcgcagcatgcatatggcccagagctggaccaaagcccgggccatgggggtgtgcactgcgcttccggtcgccgccaccccttagctcccagctctctctgcggctcttcaggcgcgtcccgaaactacaactcccgtcacaactcgcgattatgacctgagggtcccattggtcgctgcggcgcggggcacgttgggcccgccccggaactaccgctcccatgacaccccgcgattgtgattcggggcgccattggtctgcggggcgcggtgcttcccgggagatgtagtctcttctgctctggctctgttgcccagggcaaccgctccttcaggcgtgaatgtggcggctgcctctgcgaatggacggcgtgggaagaggtcggcagggctggtggggaggtgacctagctgggcgtccgggctcgcgagggggatacggggaaatggggccttctccggggctgagctggttgggccgctgcaggatggtcccgcgcctcagtttccctgtctggggtctattggagcatggtcctgcgcgggtcgcttcatagctggggagaagagcaggatggtctcaggggcgccagggttttcaagttttggtttgttgatttgtaacaactttattgagccttcatttacataccatagtgttcgccacttttaagctgacgactccgttatttttagtaaatctacaaagttgtgaagccgtcgccaccatccagctcatccagctttagaactttgcgtcaggccgggcgcggtgattcacgcctggaatcccagcactttgggaggcagaggcgggaggatcacttgaggccaggagatccagaccagcctgggcaacctggcgagaccccatctctaaaaaagataaaaataaaaaattagccaggtgtagtggcacgcgcctgtagtcccagctactcaggatgttgaggcaggagggaggattgcttgtgtccaggaggtcaagggctgctgtgagctgtgatcatgccactgcactccggctaattttttgtatttttagtagagatggggtttcaccatgtttgccacgctggtctcgaactcctgacctcacgtaatctgccagccttggcctcccaaagtgctgggattataggcgtgagtcacagcaccggcccgatctgctttctgagtttattggtttgccttttcttgacagttcttacaaatgaaatgatagggtgtgtggagtttagtgtctggctactttcttttttctttccttttttttttttttttgagacagattctcgctctgttacttaggctgaagtgcaatggtgcgatctcggctcactgcgaactccgcctcccaggttcaagcaattctcctgtctcagcgtcctgagtatttgggattacaggcgcatgacaccacgccccgctaatttttgtattgttagtagagacggggttttaccatgtgtgtcaggctggtctcgatctcctgacctcgtgatccgcccgccttagcctcccaaagtgctgggattacaggcgtgagccactgcgcccggcttggctactttcccttagcgtgatgtatttgagattcctgcgtgctgttatattagtatttgttttttaaattgctgaactgtattacactgtatggatggaccatagtttgtaatccattcactaattaatggatagttacattgttttccgttttagtctactaggagtaataaatattatggggccaggtatgatgatgtgggattgtaatctcagcattttgggaggctgaggctgcggatctctagaaccccaggaatctgagaacagcctgggcaacacagtgagaccttgtttctacaaaaagttagctaggcatggcaatgtgtgtctgtagtcccagctacccaggaagctgaggtgggaggatcgcgtgaccccgggaggtcgaggctgtagtgagccatgataacaccactgcactcagcctgggcaacagagtgagagcctgtctcaaaacaaaacaaaactattacgaacatttgcatacatttgcatttctcttgggccacatgggagtggaatccctggatcacatggtaactctatgtctaaccttttgaggaaccaactgttttccacattgaggactacataattttacaattcccccaacaacatatgagggttccaatttctttattttttttagagatagggtcttgccctatcatccgggctggagtccagtggcacgatcatagctcactgcagcctcaaactcctgggctcaagcaatcctcccacctcagcctcccgagtaactgggactacaggtgtgtgccatcagacccagctaattttttcattttttgtagagatggagtctccctatgttgcccaggctggtctcgaactcatgggttcaaacagtcctcccatcctggcctcccacagtgctgggattacaggtgtgagccactgtgggcttcaatctgttcacttcctcactgacacttgttacgtgtatttttgattatagccatgctaggggatgtgaagtagtagctcctcatggtttttttcttttttttttttgagacggagtctctctcttttgcccaggctggagtgcaatggcgcgatctcggttcactgcaagctctgcctcctgggttcatgccattctcctgcctcggcctcctgagtagctgggactacaggcgcccaccaccgcgcccggctaattttttgtgtttttagtagagacggggtttcactgtgttagccaggatggtctctatctcctgacctcatgatccgcccacctcggcctcccaaagtgctgggattacaggcgtgagccaccacgcctagtctgttactggcatttaaatgttactgagcactttttcatgtcccacacagaatatataggaatcctatgagggtagtaattgttatttttacagatgagcaggctgacacagagcgattaagtaacttgcccggggtcacacagaccaggaagtctgcattatttctgccaggcatatttttctgttctctgacccctgtggtcagtcctgtgctgggcactcctagtacagggtagttaagataggaacaagcaaacaagtttattcgggaaacagattgttaataggaatcataattcattcttgtatagaatcttttttttttctttttttttgagacggagttttactctgtcacccaggctggagtgcagtggcgcagtctcggctcactgcaagctccgcctcccgggttcatgccattctcctgcctcagcctccggagtagctgggactacaggcgcccgccaccacgcccggctaatttttttgtatttttagtagagacggggtttcaccgtggtctcgatctcctgacctcgtgatccacccgccttggcctcccaaagtgctgggattacgggcatgagccaccgcacccggcctgtagtttttcatcttttaaagtctttgtaatcttcggaagcctttgtaagtcttgcagtgggttgttcatactctttcaggggtatatgggaactctgagaatatgatgaaagctctgatatttctacctagaaaaatatacacatacggtaaagatttgctggcctgctggggagctgtgcctgtccatagcccccctctttcccagggtagcggttcttcttttttttttgagacagagtctcgctctgtcgtccaggctggagtgcagtggtgtgatctcggctcactgcaacctccacctcccgggttcaagcgattctcctgcctcagcttcctaagtagctgggactacaggtggtgccaccaggcccggctaatttttgtatttttagtagagacggggtttcaccatgttgatcagactggtcttgaacttatgacctcgtgatccacccaccacggcctaccaaagtgctgggattataggcatgagccaccacgcctggcgcttgactaatttttgtatttttagtagagatggggctttgccatgttggccaggctggtctcgaacccctgggctcaggtgatctgcttgccttggcctcctaaactgctggcattataggtgtgagccactgagcccagccattggtaatggttcttacactaagtgaaatctgattttctgggggcttgttaaatacagggatacctcgattttcacacgtcaccttattgctctttcaggtaatttgtcttttcttttttctttttctttttttttttttttagacagggtttcactctgtagcccaggctagagtgcagtggcaggcatggtggtgtgcacctgtagtcccagctacacaggaggctgaggcaggaggatcacttgagcctgagaggttgtgcaccaccacgtccagctaatttttgtatttttagtagagacggggtttcaccatgtttgccaggatggtctcaatctcttgacatcgtgatccacctgcctcggcctcccaaagtgctgggattacaggtgtgagccactgcacccagcctggtcattttcattgtcatccttgggcttgaagggaagactgtggctgggttgcaaaagacagtgtgagcttttgccaagtaggagccattgaatgctcaatacaaacagcaggtactcttatgcaaaattgctcctcttcctccacagaatggcttctgcaaggaaagccagccgtcccatgcgtgatgtttttggtgacttcagtgatgtttccttggaagattcaacaatggaagaaatcagaaacttccagatcagtagaaatcttaccaaaatagcacctggtcatagcagatttctaaaaagaaaccaaactctagatgagaaacacttactcctgaaagagaaccctgtgctcgggagtggacccaggcttgcctcatgtagaccgcccaccactgcctccaggatccgagccaatgccgcactcatgaagctggcccagctggaaacccggatcatgaatcggaagctgcagaggaatttgtctgacacggaatctgactcaatgaccgccgatgctggtcttccaaagagagctgacagaatcctctctgggggtgcactcgaactcgcgtcccagaacacagacaaaacttcccagaatcaagcccgtgaacttcctgtcaccgaaaataatgcacagaacgcgaaggtcagtaggtttctaaagaagaaacaagcacctgttgaaaacatatcccctgaagcacctgctgggaaagagaggactttgcaaacccccaaacagaaagaacctgctagaacatttgattctccagacagtgacgaagaagaaatgaaagtattgctaggaagcttgatggactcttctagagaaaaaaacacgaatcaaggcttcagcagcgctaacgtcagcgaggaagaagaaagaaaactattttcggtgagattttttttttttggtaaatttattttaatttatttaatttaattttttttttgagatggagttttgctcttgttgcccaggctggagtgcaatggcacgatctctgctcaccgcaacctccactcctagattcaagtgattctcctgcctcagcctcccgagtagctggaattacaggcatgcaccaccacgcccagctaattttatgtgtttagtagagatggggtttctccatgttggtcaggctggtgttgaacttccgatctcaggtgatctgcccgcctcagcctcccaaagtgctgggattacaggcatgagccaccatgcccggccggtgactggctacttttttgtattttttttttttttgagaccaagtttcgttcttgttgcccaggctagagtgcagtggcgtgatctcagctcaccgcaacctccacctcccaggttcaagtgattctcctgcctcagccttcctgagtatctgggattacaagcatgcaccaccatgcccggctgattttgtatttttagtagagacagggtttctccatgttgatcaggctggtctccaactcctgacctcaggtgatttgcctacctcagcctcccaaagtgctgggattacaggtgtgagccagtgtgcgtggcctatttgtggaatattttctttctttccttttttttttttttttttttgagatggagtctcattctgtcaccaggctggagtgcagtggcctgatctcggctcactgcaacttctgcctcctgggttcaagcaattcttttgcctcagcctcccgagtagctgggattacaggagcataccaccacgcccagctaatttttgtatttttagtagagatggggtttcatcctgttggccgtgatggtctcgatcgcttgacctcatgatctgcccgcctcggcctcccaaagtgccgggatttacaggcgtgagccaccacgcccagccttgtggaattattttctactcccaacattatcttacctaaatattgtactgtgactttcagaaatgaagagagaaaggggatgcagtaagagaaaaatgtgatacctgtggtcttggtctcatgctccccgctaattgcactgtctgtttaaccataagaacttttaggtatcagccaggtatggtggctcacacctgtaatcccagggttttggaaagcttaggtgggtagattgcttcagctgtggtcaaggccagtctgggcaacatggcaaaacccattcctacaaaaaaaaaaaaaaaattagccaggtgtggtggcacatacttgtagtcctagctgcttgggaggctgaggtgagaggattgcttgagcccaggatgtcgaggctacagtgagctattgagccactgccctccagcctaggcaacagagtgagaccctttctcaaaaaaaaaaaacaaaaaacaaaaaaacaaaaaaccttagttgtcataagtttgttaatttcaagtgttttatatcaggtcccatctcaactgagagcatttactgtacccagcgtggaactctccagcgcaaagccttctcagacatcacacctgccaacctccctggcagcagacagaacccttcacagcactcgctcaagagcagactacccacagagtcacgtttccagtgacaccgcctcccacacgccgtcagtttccatcacaggcgccttttcaaactcagtgtctttaaagatggggcatgtcaagcttgtgtcctccccgggaaggagtgaggctgagactgtggacgagccagtctcagaaggtgctgatgacagcctcgacggtaatcccagtcccggtgcaaagccagtaccttgggcaggaagggtggggccacctttagagtccctgacgcagtggtcatggggcattgccacaggcagggagttttgagtcgcatctcacactcagctttctaactttcttgtctggttgaggggccaagtccgatttttgtgctatctttatttatttatttaattctgagacagggtcttgctctgtcgctcaggctggagtgtagtgggcatgatcagggttcactacagcctcaacctcccaggctcaagcaatccgcctgcctcagcctcctgaccagctgggaccacaagcgtgtgccaccacaccgggctaatttttgtactctttgtggagaccaggtttcaccatgttgtccaggctgatcttgagttcctggccttaggtgatctgcctgccttggcctcccaaagtgctgggattacaagtgtgagccactacacctggcttaccaactcatctcttgagtcaatttaaacctgttggaagctgttggaggctaggcctggtggctcacgcctgcaatcccagtgctttggaaagcctaggcaggaggagtttgagaccagcctggcaacatggtgaaaccctgtttttacaaaaaatacaaaaattaactgggtgtggttgtgcgcacctgtagtcccagctgctggggaggctgaggcaggaggatcgtttgagcctgagaattggagcctgcctgggaattggaggctgcggtgagctatgaacacaccactgcactccagcctgggtgacagagcaagactccatctctaaaaaaaaatttttttaaacccaaaaacctgttggggcaccagaatctccacagagaaccccacactcctgggtcccggcacacacttggttcaggcactggcctccaccctaaggttctgtggtgcctttgacttgctgtactatttttttgttttttagaactctttttttcagaactcacagtctattaacttgctgtaaatgacaacataggatgctttggggccatgtctcaggtctgcccctgctccacagtcttcccactctttccccccagctggctggctgccctgccacctcccaccccttacaccacacacgtacttctcagcaacttccaacagtacactctgatcagctgctaatctgtctagaccaggggctagcaggcctgtcttctgtctgtttttttttttgtttgtttgtttttttgagatgttgcccaggctggggtgcagtggcgtgatctcagctcactgtaatctctgcctcccaggttcaagtgatgctcctgtctcagcttcccaagtagctgggactataggcgcacgccaccatgcctggctaattttttgtatttttagtggagacgggacggggtttcaccatgttggtgaggctggtctttttttttttttgagatgacatctcgctctgtcacccaggctggagtgcaatggcgtgatctcggctcactgtaacctccgcctcctgggttcaagcgattctcctgcctcagcctcccaagtagctgggactacaggtgcccaccaccacgcccagctaatttttatacttttaatagagacagggtttcaccatgttggccaggatggtctcgatctcttgaccttgtgatccgcctgcctccgcctcccaaagtgctaggattacaggcgtgagccaccgtacctggtggtcaggctggtcttgaactcctgaccttgtgatctgttctcctcagcctcccaaagtgctgggattacaggcatgagccactgtgcccggccctgtcttctgtctgttttttttttgacagagttttgcccttgttgcccaggctggagtgcaatggcgtgatcttggctcactgcaacttccgcctccgagattcaagcaattcttctgcctcagcctctcgagtagctgggattacaggctcttgccaccacgcccagctaatttttctatttttagtagagacgggatttcaacatgttggccaggctggtcttcgactcctgacctgaggtgatccacctgcctcggcctcccaaagtgctgggattacaggcatgagccactgcaccaagcctgtcttctgtctttataaagctttctcagaaggcagccacgctccttcctttacacattgtctatggctgctttcacactatgacattggagctgagtcagtctgtccccaaaagctggaaatttcccagctagccttttattttttatcattattattatcattatttgttatgataattatttttgagacggagccttgctctgtcacccgggctggagtgcagtggcatgatcttggctcactgcaacctccaactccgggttcaagcgattttcctgcctcagcctcctgagtggctgggactacaggcacgtgccatcacacttggctaatttttgtatttttaatagagatcgggtttcaccatgttgaccaggctggtgttgaactcctggcctcagttgatctgcccatctcggcctcccaaagtgctgggattacaggcgtgagccaccatgcccgatgattattattattttttagagacagggtctctctatgctccaggctggagtgcagtggtgtgatcatagttcactgcagctttgaactggtctcaagagattctccggcctcagcctcctgagtagctgggactacaggcacccgccaccacgcctggctaattttttgtatttttagtagagacagggtttcattgtgttagccaggatggtctcgatctcctgaccttgtgatctgcccgcctcggcctcccaaagtgttgggattacaggcgtgagtcaccgcgcctggccatgtcttcatatctttctaaacatttgtgggagattaggctggctgcggtggctcacacctgtaaacccagcactttgggaggccgaggcaggtgaatcacttgaggccaggaattcaagaccagcctggccaaatggtgaaatcttgtctgtactaaaaatagaaaaattagccgggcgaggtgtcaggcacctgtaatcccagctactcaggaggctgaggtgagagaatcacttgaacttgggaggcagaagttgtggtgagccaagatcgtgccactgcactccagcctgggtgacagagtgagactctatctcaaaaaaaaaaagaaaagaaaagaaaaaagaaatttggaaggtttgtaaaaatttatggagtaaataagagagtaaatgtaaacgcttatactcattttttaattacagagtttagaataaatattttatcgcttgacggtctggctccagctgtcagtgagaactccgatttggaacaggaagtaagtacaacaaagtcatttttcatggtcgattgtttttggcttcaacatttttttttttaaatttttaaaaaatttaaaaattgaggcagggtctcactatgttgcccaggccgtcctcaaactgggctcaagcaatcctcccgattcagcctcccaaagtgctgggattacaggtgtgagcgaccatgcctggcccaatgtcgattcttatgtggaaaagcaagtaatgtttcatttaggcctatagttttcaaatctgccccccaggggacattggcaatgtctggtgacattttggctgtcatgactagggggtgggtgacagatgccactggcattgtgagtgggtggaggccaggaacactgctccatattgtgtaatgcaccgggtggcccccagctgccaagaatgttgtggcctctgatgtcaagagtgcagtaggtgagagaccctgatttaggtgctaacaggatgaagctaccttggttagctggtgattaaagcacatcccacgtaaagccgcccatgacaacatctgcacggaggcaacacttcaccagccgtatccagtcacactccctgttgtgatttttgtcctggtggccaccggcactgtcagatacacgtgttggttatacacagtgatgacattttatttttattttaaaatatttattgtttttattttattattattattattttttattttaaactttttttttttttttgagagaagtcttgttcttatcccccaggtttgagtgcaatggctcgatctcggctcactgcaacctccacctcccgggttcaaacgattctcctgcctctgcctcccaagtagctgggattaagtcccctgccaccatgcccagctaatttttgtatattttagtagagacggggtttcaccatgttggccaggctggtttcgaactcctgactgcaagtgatccacctgccttggccccccaaagtgctgggattacaggcatgagccactgcgcctggcctattattattattattattattattattttgagacagagtctcgctctgctgcccaggctggagtgcagtggtgtgatctcagctcactgcaagctccgcctcctgggttcacaccattctcctgcctcagcctcccgagcagctgggactataggcgcccaccaccaggcccggataattttttttgtatttttagtagagatggggtttcaccgtgttagccaggatagtctcgatctcctgacctcgtgatccgcccgcctcggcctcccagagtgctgggattacaggcgtgagccaccacgcccggccttaattattatttttttgagacacagtctcgctctgtcgcccaggctgggactacagtggcacaatctcagctcactgcaacctccacctcctggtttcaagcaattcttgtgcctcagcctcctgagtagctgggattacaggcacccgccaccctaccccactaatttttgtatttttagtagagatagtttcaccatgttggccaggctggtctccaactcctgacctcaggtgattcacccaccttggcctctcaaagtgctgggattacaggcatgcgccaccatgcctggcccaatttatttatttttgagacaggtctcactcaggctggaatgcagttgggggatcatggctcacttcatcctcgatgtcctaggctcaagcaatcctgcccagcctcctgagtagctgagactacaagcgtgcacccatgcctggctaattttttatttttttgtagagatatggaccggctgggttgtccaggctggtcttgaactcccagcttcaagcaatcctcctgcctcggcctttcaaagtgccgagattacaggtgtgagccattgcccccaggcatgatgaaacttaatttttaaaatattttttttcttacagaggtagggtcttgctatgtctcccaggcaggtcttgaactcctgagctcaaaggatcctgccgcctcagccacctaacatttcatcagtccatgatgaaatgttttttttttgagacagagttttgctcttgttgcccaggccggagtgcaatggtgtgatctcagctcaccataacctctgcctcctgggttcaagtgattctcctgccttagcctgctgagtagctgggattacagatacgtgccaccatgtctggctaattttgtatttttggtagagacggggtttctccatgttggtcaggctggtttcaaactcccaacctcaggtgatctgcccgccttggcctcccaaagtgctgggattataggcatgagccactgtgcccggctgaaaattttttaattttttttttcttatagaggtagggtcttgctgtgttgcccaggcaggtcttgaactcctgagctcaaaggatcctaccgcctcaaccacctaaagtccttaagtccatgatgaaatgttaaatgccatccacgtgccacctaagcatgcgtcacaccatcaggattcctgcagccccgtggacatgccgtactgaagacgccacagttctgtttagaatactccgtgcccacatctaatgaggacctggtgtgtccccttgtctgcgggagtgctgcaggtccccagctcctaggagtgcagtgttcctagcatgttgatatttccaaaacacttcccagccacctctgccattcttcattttaggaggaaagtgctcagagacaaaaaacagctggcaaaatcttcagagccgaggcgtccactgggcaggatgccccgaggcaggcccaggcgaggagctgggcatcacagggaaaggccgcctctgcagagggggatgagagcgaggtctcggagcatctcagtgccagctcggcttctgccatccagcaggacagcacttccagcatgcagccaccatctgaagcccccatggtgaacacagtcagctcagcttattcggaggattttgaaaactctccaagtctgacagcatctgagccaaccgcccattccaaggagtctcttgacagaacactggacgctttgtctgaatcctcttcaagtgtgaagacagaccttccacaaacagccgagtctaggaaaaagtcgggcaggcacgtgacaagagtgcttgtgaaggacacagctgtgcagacgccagatcctgccttcacctacgagtggaccaagggtaagccttggggcccgtgggggccggggcagccgggacaggagctcagcgtgtggtttacagcatcctgggagacacgtgggagagctcaggttcctgagatttgggctcttgttattaatcacctggaggggttggccaagcaaggtggctcacgcctgtaatcccagcactttgggaggccgaggcgggaggatcacttgaggtcaggagttcaagaccagtctggccaacacagggaaccctcatctctactaaaaatacaaaaattagctggctgtggtggtgtgttcctgtaatcccagctactcaggaagctgaggcttgagaagaacccgggaggtggaggttgcagtgagctgagatgatgcccctgcactccagcctgggtgacagaatgagactctgtctcaaaaaaaataaaagtcacctagggaccttggctcaccatttcctcttccatggacgagggacagccgccctcgtgtgtcccgatgtcttcctagccctgaagcattcagaaggatcagaaccaaggactagggtagcacctcccacaggatgattcacggggggactccagcaaggtctggagacattattagttgtcacaactcagggtggggaatgctatcggcatctgctgggtggaggccaggggtgctattccacaccccgcagtgcacaggatgcctttgtcctggagaatgaacaccctgggtgactttccagatatttctctctctctctctcactctgtttttagagatggggtcttgctatgttgcccaagctggagtacagtgacccaatcatagctcactgcagcctcaacctccctaggctcaggtgatcctcctacctcagcctcctgagtagtaggattacaagcatgcgcccccatgcctggctaatttttatattttttgtagagacagggtcttgccatattgcccagcctggtctcaaactcgtgggctcaagcaatctgtcagccttagcctcccaaagtgttgggattacaggcgtgagccactgcacccggccctgtatcttttttttttttgagatggagtctcactctcttgcccaggctggagtgtagtggtgcgatcttggcttactgcaacctccacctcctgggttcaagcgattctcctgcctcagcctcctgaatagctgggattacaggtatgtgccaccacgcccagataatttttgtatttttagtagagatggggtttcaccatgctggccaggctggtctcaaattcctgacctcgtgatctgcctgcctcggcctctcaaagtgctgggattataggtgtgagccaccgcacctggccccctgtataattttaaaatgttctttgtagagacagggtctccctatgttccccagcctggtcttgaactcctgggctcaagtgatccttccacctgctcatgttggccccccaaggtgctgggactacaggcatgagccaccatgcctggccttcgggcatttctctcattcccagcttcagtctcggctcttgctggtggaaaggccccattcttttaaacattcccatgttattattttattttatataattttattttatgagatggggtctcgctctgttgcccaggctggagtgcggtggcacaatctcggcccactgcctcctccacctcctgggtttcagcgattctcccacctcagcctccccaatagctgggactagaggcgcctggctaataaacattcccttttaatatctcttttctcatccatatggctcttgacaaggtagactggatgtgaaaaatgatgtagttcccagcctggccaatatggtgaaaccccgtctctactaaaaatacaaaaattagcctggtgtggtggcacgcatctgtagtcctagctactcgggaggccgaggcacaagaatcgcttgaaaccagaaggtggaggttgcagtgagctgagatcgtgccatagcaccccagcctgggcgacagagtgagactctgtctcaaaaaaaaaaaaaaaaaaaaaaaaaggcaatgtaattctcactggatctatttgttttgatttgggggcttaacctaacatcagcctgacgggccccccaggagagggtgagtggtgtctgtttctcaggagggaaagtcaatcacatggactgagtcaaatcaccttggaggtgttaaatggtattttcaacctgggatctgggctcagaattgtttgtgtctctctgcacttctgtccatatttttggcaatttagggatgctttcatgaaacactggcgaggctgttttcctagactaggactgacagggaaaggagaaagaaaaaacagcagccataaacacgctggcctcagagcccagagaacacgcaacatcctgaggtcaacagtgacccttagaagaagggctgggaaagcacatcctccactgctctcgactgcagccaccgtgagccggagccaccgctgcacccagctaggatacccgtgccttgagccaagaaaacctagcagaaaaatggaggcagccttgggaaatacttgaaaggggaagagggtaaaaaaaagtaaagaagggccgggtgcggtggcttacacctcagcactttcagaggctgaggcaggaggattgcttgagcctaggagttcaagaccagcctgggcaacatagggagaccctgtctctacaaaaaattttaaaaattagccaggcgtggtggcgcacctgtagtcccagctacttgggagacagatgggaggattacgtgagcccaggaggctgtagtgagctgtgatcatgccgtgcactccagactgggcaatagagcaagaccctgtctcaaaccaaaaaaaaaaaaaaaaaatgcaagagtggcgatcaccttcagaaagagggaagaacaaggtcacgtagtttattccagggtcgtatctgtggacccgaaagtcatttctctgcgtcctgcctgcttacccctctctttgtccccgagatagtggccagcatggcagccatggggcctgccctgggaggcgcctacgtggacccgacacccatcgccaatcatgttatcagtgcagatgcaatagaaggtaacagcccggctcgggggatccttcctgtcacattttacaggactcatttcacctgcagattcacacccactctggaggtgtggcaccccttgcatgctggcttccaggggtccattgggcagggattattgcagccacaggcacctgccatgaggagagaaaaggtgtggatgcccttgaaccttctgtctcttgcaaagagacaccaatgtcacacaaaacaagagggtgaagagtgatgcttctgtgccctgcaccccaacaaggccactttttttgtttgttcgttttgagacagtctcgctctgttgcccgggctggagtgcagtggcgcgatctccactcactgggacctctgcctcctgggttcaagcgattctcctgcctcagcctcccgagtagctgggattacaggcacctgccaccacgcccggctaatttttgtatttttagtacagacagggtttctccatgttggccaggctggtctcgaactcctgacctcaaatgatctgcccacctcggtctcccaaagttctgggatcacaggcctgagccgccctgcctggcacaagaccacttttgttttgtatgttccccttggtggcattacatcaataagccatagtttatttcccctgaagacatgtatttgactgatgctgagttgcacagcctgggtagacattcccttgcctcctgggctgagtctgtgtggccctcacaaaggctccagtccagcctgaggcatgagggaggggccccagcagccatcttagagagtttagtctttgtcgagtccagtggagccaataaaggcttgtgatacacgtaggggtccatctggtacctactatttttttcccttttcaattttttaattttttttttttgagacggagtcttgccctgtcacccaggctggagtgcagtggtgtgatcttggctcactgcaacatctgcctcccaggttcaagcgattctcctgcctcagcctcccaagtagctgggactacaggtgtctgccactacacctggctaatttttttttttgtttttttagtagagatggggtttcactatgttggccaggctggtctcaaactcctgatctcgaactcctgatcttgtgatccgcctgcctcagccttccaaagtgctaggattacaggtgtgagccactgttgcttaaacccaggagttcgaggctgcagtgcgctgtgatggcaccgctgtactccagcctgggtggcagagcgagaccctgtctccagaaaaaaaaaaaaagatttcagagagcagcctggcacctgagcggtggggggggggctgcagaatttgtggggccccagcgaagccaccgagtaacgcggagctgggtcagccctgaccgcttacagcccggccgtgctggcactccatgatgtgctgaagcagcagctgagcctgacgcagcagttcatccaggccagccggcacctgcacgcctccctcctgcgctccctggacgcggactccttccactaccacaccctggaggaagccaaagaggtgagcgcagctccccatgggcaggggcagggcagtaggggagcggcagctcccagaggccgggccgaagggatatgggccggggcctgggctccagcgctcagcccagggctgcagggatgcagtggggccatcacctgtccctgtggagggagcctcatttcctgccaccctgtggcaaaagctggtacagggtggggtgctgagctcctgcaccttgcagccagccccgcctgggctgtgtgacctcagactaaagggacctactgttcgtggcactgttttctcccatgggaggggtcctgtccctttccctgagcctcctgagacatccccgagatggggccagaggcggcccagctgttctcctcagcaatcaccctcacctctttttttaccctctaagaatttttatctgattaccagccaggtgccgtggctcacacctggtgctttgggaggctgtgatgggtggatcacttgaggtcaggcgtttgagaccagcccggccaacgtggtgaagccccatctctactaaaaatacaaaaattagccaggatggtgacgggcgcctgtagtcccagctactcaggaggctgaggcaggagagtcgcttgaacctgggaggtggaggttgtagtgagctgagatcgtgccactgcactccagctcgggtgacgagcaagactccgtctcaaaaaaactttttaaaatctgattaccaaaaattacgtggctgttttctgaaaatcttgttgcagagatgtgtaacctgcaagttctccttaatttcagaggtaactattaccaagctgatatatatactccttcagactcttgtatgaaccatagtatgcgtatttcttttttttaaaatttttttttgacggagttttgctcttgttgcccaggctggaatgcagtggtgtgatctcagctcactgcagccttcgcttcctgggatcaagcgattcttctacctcagcctctcaagtagctgggattacaggtgcctgccaccatgcccagctaatttttgggattacaggtgcgagccaccatgcctggccacgtatttctttatagaaatggcattatactatatgcagtcctttatggtgatctattcataaacttttttttttcttttgagactgagtttcactcttgttgcccaggctggggtgcaatggtgcaatctcagctcactgcaacctccgcctcctgggttcaagtgattctcttacctcaccttcctgagtagctgtgattacaggtgcgaaccaccatgcccagctaatttttcatatctttagtagagacagggtttctccatgttggtcaggctggtcttgaactcccgaccacaggtgatccacctgcctcggcctcccaaagtgctgggattataggcgtgagccaccgccccctgctttaaacattttacataacaaatttttcagtgtttatttctaaaaagtgatgttaaagccaggtgtggtggttcattcctgtaatcccagcactttgggaagctgaggcagggtgggtcgcttgagcccaggagttcatgaccagcctgggcaacatagcaagactccatctctattaaaaaatacaagaaaactagtttaagtttagcatagtggtgtgtgcccgtagtcccagctctctgggaggctgaggtgggaggatcacttgagctggggaggttgaggctgtagtgagggagaaagcgggactctgtctcaaacaaacaaccataatgcaataatacacaaaccaaatttactaagtatcaaggaatatccagtgttgagatttctgcttgtctgatttaaagttgtgtgttttgttccgatttggtaattcggatccaaagtccatactatccgatatgtcctttgagcctcttaatctagagcagcgaccggttctcaatgctgagcggttggggatcccctggaagccctgtgaaagcgatgctgggcccgcaagcaggcggggtgggcctggagctaggcgtttctcccacatgccccgggacgctgctttggaactgtgccgagtcccctgcatgccaggcctctcgtttccttgtggtttatctgctgaagagggcaggttgtgagtcccacgggtctctacaatgtcaactttgctcattgcagccctctgggggctttgaactcatgcctctgttgggcgtccatcagcccatccgatgcaggcagaagccatctgactgtgccacctggctgcagcccaccatagctcccagctgcttgctccaggcgcttctccctgatctcagccactccaagggcactcacaggcacccctccctttctctgtcagggctcacccctcgcagggctgaccctctaccctgtgttcccacagccccgtgcgccaacctgtcacacacatcctgtggttttacacttctgtcactgacaggagcctgctggggacaggtgctggctccactccctcctccagcaccctgtctcagagtgtactgaggtgacgatggtgatggcgtggtctgttctctgcctgacagtacattaggtgccacagacctgccccactgaccatggaggatgccctggaggaggtgaacaaggagctgtgagcgccagcaggtggagcttgacgtgacgtcttaacaaaaggtatcccgtcctgtgtactcagtgcacacacacgcacacaaacatagagctcatcagtgtccaagtgtgacgttccgtggtgggggcaggtggtactggggtgatggacacacacacacacagtcagcatccaggtgtgacattccatggtggggcaggtggtgctgcggtgagggccccagactcctctgagccaaatcccagctcagtgacagctctcccagcagcatgcccagctctatgacaccacaggccagtggaaatagaatttcagtggagctgtccccactcacagcaggacaggggccaccagcctctgcagagcagctccacccaggcaggtcctggcatcccagtgagccagagggagacagggtggatgggagaagccctgctcgagggtaaggacatgggaccaggtcagcacgctggggacgccatgtgagcccctggacacggcctctgaccccaggctgcacagctcaaaccaggacatgtgtctcctcactcagcccgtgcacacttctgacttacacatgtgcgggagaaaggtctttaaaaaaaggctttatttgaaggcaaaacaatgaaatccacaagaaattactaacagcacgtgtttacgttttatcctgaatcatacattttaacaattcacagctacaggaaatctagaacaaaatcaaatattcatcacgttgggttgaaaagttggaagattttgcatcttattgaaaagaatttttcaaaaatgtttctgtacaaatgaatggaattgcaccaggctgcccatggacaccaggtgtggccgattcccaacggtcacccaccagcttctggcaggagcagctcccctcctggcctcccctcccttcgggggtgtgaaatgaaatgatggagtggaaggcgctggctggggtcgggctccatgctctggatgggactgggccgtcgcacacgccagccggtgcagggttcttccaagtgcaaaactcaagcaggggacgcgacgggcacagactccgaggcagcgctcaacctgaagtgtcttaggctggtttcctgttagaatcttgtttcccagataacagcaaatggctacattccagaaaaaaaatatcaacttatacaactaaaataactgaactaagggccagtacgccttcgaagaattaggtttcagaatctcactgggcctcctctcaggtcagtattcttctttctagacctaaaccaaggagagtaaaaatgaaaaccctgcttcacttcgcaagtcaagtcaaagttttgtgtttctgtttttcaatccgcgggcagtcatggcactgggcttcggctttgtccctacacagccgaggggaagccaggtcagggccggtgggtgcggggagctggaggaaggagctggggtgccggctctggctcaggccaacccttcctgcacatgctcctcctggagcctaggaggaggcttcaatctgacttagggcagatgcacatccatcccttcgtggctgaagaatttactcgggcggagggtcttgtgttttttgcttcgctataaaggaaaacgagcctggggccctggtggctgcagcgcctcctggtgtggtttgtgggtggcacccgtgccctccacgccatggagcacggcgttcccactgggcatgcgctggtcttccttctcttcctgtggctctccacaagtggagacggtgtaagaactgagctgtcactgcaatcttcctctgccagtcagccaggaaggtcccacagccggcaccgctggccaccggcgcggctcccggcatgggcgcctacttacactcgtccctggccttcatgcgggcgatgaaggagtagctcttgttcctgcggtagttctcataggggtcatccagagccacgcccacgcctttatactggtcccacttatcccggacgtccccgcccttgatggggtcctggatcccttgctccttcgcaccgaggccgcctgagccgctccagcctggaaacagagacgcagtcacaaccacaacaaggcggaggcagatgggggtgcacgtggggggctgaatgtccagacaggcagtgtagacatgggaaatgggtagagagaacccgcaggccggccctgtctagagggtctgggtggagtcagaaccggcctgactccatccatccccacatgcactgaggaagagaaagcgctggtgactcccgggcccagcacgcgtgaggacccatcccgcgccctccccattccctcgccttacccatcttcaccagcatctgatggcctttgttctcttctccgagccttgagtcagggatgggaggcgccgaattagaacccagaccagcagaggaactaaaatcgagacaggttattctttttaagaagtaactgagacatttattggaatgacagtgatgaggacctcacagccgcagcttgcgtgcatgctcactgtcaccaggtgacaccgtatgcagattttgcgtctctacccgtttatcctgtctcagctagataagggggctccagacgctggcccccaccccacgctcagcattgagagcaggacacctccaacccagatggtggttagaaagcagaccccagttactgcctcaggcttcgccaagtggctactgtggtgaagggtgaggggtgccactgtccccgggctaatgctggcggcctcctaacacagtctcctaaccaccaatgtttccacattcacagcaaagcaccgcagcttcccagagttaccagcgcagcacttaagacaggatcttacggcggggtggggctcctggaccgtgaccggcgtcttcttcctggggagtacgacttggaccgggaccgcgactgggaccgggagcggcttctggaggagcgcgacctgctccgacttctgcagggaagggtgcccaagggtcagcagcagccaggcgtcgtggggaggccacaggaagaggcctcaggcactgccctgaggcagcctctgcctacctagatctggagcgggagtaggaacgggagcaggagcgcgaccttgaccttgagtacgagcctgaagacttggaggatcttgagttggagcgggaggaagaacgccctcgactcttggatctgctccgagacctcgagggtccgctgtggggagaggcctgatgatcaggtgccccagtggatgggctgcacccagcccaccctggccctcaggttcctagaccaccccagatgcaggggctctggctgtggatgtggcgccatagccacagcaacggtaccaagttcctaaatagtgtggccgagcctgctgctgtgtgaattcaggccttgtggaaaacaccgccccataggcacaggctgtgtgagggtggacgtgatgagtgtatctggggtctgctcccacccatcacaagctgtggaccctggccccccggccactgcagacatctgcgcttttacctgttcctcttctcctggcctttcctccgccgggcccgcatttttgctcggaagaactcatagaggccgttctgctcccagccttcactgtaagacacggcattccgtgtgtgaccacgtgacacccacccacaaggaagtcgtgaaaaagtcatcaggagttaatccacagaaccttggagagtacatggccctgtggctgtgggctccgagcatgggcgcagtagagcttggttcagtgttcccacagggctgtcctcctgcagcccagtggctcctctggtgcccacgcccttgccaccctgctgttccgctgaggtggtggggacccatggtctgtggaactgggaaacaggaacactgactcatgggtggacaggcctgcagcccagcacaggaaggaggggtgaccactgggaagggtgggctgagggccctgtggcagccggctgcttgagacgtgccgccgtgccacaccttccctaacttcttctgatgtgtctccattaaaacgcccttcattgagggccacgtgtgtgctgtgcctgtgacacacacttgtcactcaggcggggggagggcagtttctcctgagggacagccacattttctagcctggacagaaggtgtggttgcagggagccgggagaggggacagaggcctcccgcccaccccactgacctgggccccttacctgttcctgggcctgtcgtgggacggggggctgtagaaggcctccactgcagccagcagcctctcgctgggcggcatggggggtgggaggcggatgtctttagggtccaaaggcttgtactcgtgatcttccagctgcagcagagaaccccagctgtcaccatgcctgggcagagccctctcaggcccacccagggtctgcaaggagtggggtcagggcagggcccaggttcagtgtcaagggtaccctgggcaccagagctcctcatgcttccctcttggggatcccactctcttgtaggacctcagccacaccaaccatggtgggtcatagctgctctgaggctgatgacagtcacagggttctctcttcagaaaatcacccacaggggacatggtctccaaactcaggtgacctgaacaccctctggtttattcagacatgcagcgggcccctcacgtcaccctttgcttgcaatgcctaccctgggcccccgctcagaacagcctcagccccggccctggagccccctggcctgtatccttcttctgctccgtctctgtcctcctgttgaggccctgccctgcctggcttgcctgggcccccgcccgcagctctccctgctgcccatggctccgtgaagtctgcctggacttcaggtggatgtgtctgagggggtgggaagtggcagtggccagcatgcccttggaggccccaagccccggccctggcctccccaaccccccctttttttttttgagacggagtcctgctctcgcccaggctggagtgtagtggcgtgatctcggctcagtgcaagctccgcctcccgggttcatgccattctcctgcctcagcctcccgagcagctgggactacaggcgtctgccaccacgcctggctaattttttgtattttttaatagagacggggtttcaccgtgttagccaggatggtctcgatctcctgacctcgtgatccgcccgcctcggcctcccaaagtgctgggattacaggtgtgagccactacgcctggccagacctggccccttcttgcctcacctcttgccctatgctccggccatcccacagtggtaccagctgctgccagccctgcccggcttctccagggccacccccctccctgtgtgcttggtaggcacagctcacaggtggctccttctaagacattccctccatcagcagccctgggacaaggtgcttctgaggccctggaccaagaaggacgaagagaggactcgagcctcatagcctagctagccccacatggctgaagctccctgtggtgggagggataggaggggcagggcagggcagacatggtgtcgctcacagccacaccgtgctactccggttcggcacctcccactgacggatcagggtccctagggagtgggagatgaaggggagccccggaaggcacccggtcccgtgcattcacttttcacaaggagaaacggggaccagtatggtaagcgtgctcagcttggagcccactgtggggcattaccttcacgaggggggccatcagcccagcagggagatcgaagtagggcacattggggaccaggctggggtcatcgtggttgatgtggggtgggccctgtcgccgcatgtgtgggggctgcccgttgaagccatgggggggagggccgaagtcagggtgctggggtccagcccaaggcgggtgctcgttgatgccaggatgaggcatgcggtggccagggtggtggtgagggggccccatttctgcaaaacagagacttgcctcaggaccacaggccagtcaggatctcccaggcgacaagtgctggaggggaggggctcagtgaagggccaggagacgaacccctcctgggagcctgtccagcatcttctctcactgcttaagaccaggcagcaaggcaccgaggagccaggctccgaggggcctgtcccgcacccataggcacagccgagggagcttgaggctgagagaagagaaccccaaaaccccaaaactgcacggtgagggctaagttgtgaccctccgaatccatacgctgaggtcccagcccccagtagctcaggacggaactgtatttggagacagagccttcaaagacacaaatgagttaaaatgaagccatagtggcccgaatccaacgtgactgttgccgttataataagagattaggacacagacatgtagagagaagacggtcacctatgagccaaggagacaggcctccaagacactaacctgaacccgccacacctccaccttggacctccagcccccagatccttaagacaatacattccagctgttgaagccgtccaggctgtgggacttatcatgtcagcccaagccaaaaagtaaaagcaataaatgtgccaagcggtcttcaagctgcatttataatcagaaatgtatttaaagagagaaggctgggcatggtggctcacgcctgtaatctcagcactttgggaggccaaggcgggtagatcacttgaggcccagagtttgagaccagcctggccaacatggcgaaaccccatctactaaaaatacaaaaattagctgggcatagtgactgatgcctgtaatcccagctactgaggaggccaaggtggaagaatcacttgaacccaagaggaggctgcagtgagccgagactgtgccactgcactccagcctgcgtgacagtgaggctcagtctcaaaaaaacaacaaacaacaacaacaaaaggccaagcgaggtggctcacacctttcatcccggcactttgggaggccgaggcgggcggatcacctgaggtcaggagttcgagaccagcctgggcaacatggtgaaaccctgtctctactaaagacacaaaaaattagccaggcatggtggcgcacacctgtaatcccagctactcgggaggctgaggcaggagaatcatctgaatctgggaggcggaggttgcagtgagctgagattgtgccattgcactccagcctgggcaacagggtgagactctgtctcaaaaaaaaaaaaaagtactaaaagattagaaataaaatcaataacaaagatactaggcatggtggctcacatctgtagacccagctactctagaggctgaggtgggatgactgcttgagctcaggagtttgaaagtagcctggccaacatagcaagaccccatctctatttaaaataaaataaaatttttttaaaaaagaaaagtagttttttgttttttttttttgagacagcggtctgtcgcccagggtggagtacagtggtgcgatcacagctcaccgcaacctcagccttctgagcagctaggaccataggcgcccgacaccacgccaagtattgattttttaaacgaactaatacaacgggaaaactgatgcaaaaaacaagcagcagcagtaaaaagaacgaggccccgccctgccctcgccacgcccacccacggcaggaaccttttcctactggctctgcctcatctgcagccagccgggcctcatcagggcggcaaaactgagtctgtgcccccacttcctgagaacccaggccgggctcctcggacgtcccatgaccctgtgtctgtcactgtgcactcaggagcatggcagggccacaagcagcgccaccagcctgctcggcaggcgagccgtggatgcctccgccaggccctacccaggcgcccgtacactcaccggcagggaagtccccctgggggtagtcgaagcggtggggatagggcggccgctcgaaggggtgccgtggcgggaagtcgtcctgcatgaagcggggcgggaagcggttgaagttgtgggggtgcggaggctggttgaactgcgggtgctgctggtggggcgggaagggcccccggaagtgtgggggccgctgcatgcggaagggtggctcgcgctggcccccgccccagggcggctgctcgtgctggctgttccaggggccctcgaactggctgttccaggcggcgtcgggctggttgttccagggcgcgtcgcgctggccgttccagccggggtcaccgcgctgctcgccccacatgccctcatggctgttgttccagggggggcagtggggtgggccgccctggtggtgcgggtagggtggctgctctggcggctgcaagggaagggacaggcttgagccctgcgtggtctaggccctagtgctcggcagcatcacagcgctcggcagcatcacagcgctggctcagaccatggaggcgctgccctggccacgttgaggcgcctcctacgctgacgcctgcgaggatgctgggcacctgctctcagcccgcaccacatgctgctgcaaaatgaccagacacccaaccgctgcacccgcatctcagtcccggggctgtttctgccgctggggcgcgctgcacccgcacacaggccgcccgcgccacaaggtgctccccgctaccactgccagacaaacgccagctccctcgcccctcaggggcaggtgcagaggcacagacggtatcgcttctcagggcaccccaggcacccatggggcggggctcactctgacaccccctgccctgcctcactccccctctccccaaaagccgtctgctgggcagatacactgcggcacacacatccttgtcctggggtctgcttctggggactttcaaaccaagccagcatcttcctgtagactgaagacgggaggctcttccctcatcagcttctgctctggagacttaaagccaggagggcaaactccagcttgggcaggggaggggaggagcacagaggccaatgagaaggccggtgtctagggtcacagctgggtaactgcgctgacccctactaaggggaggctggcccaggctgccacattcaccaggcttccaagagaagccagagagccagatattaaatatcaggaactacttgtttttctttttcttaatttgagacagtctcgctctgttgcccaggctggagtgcagtggcgcgatcttggctcactgcaacttccacctcccgggttcaggtgattctcctgcctcagcttctcgagtagctgggattataggcgcctggcaccatgcccggctatttttttatctttagtagaggcgaggtttcaccacgttggccaggctggtctcaaactcctgacctcaaatgatctgcccacctcagcctcccaaagtgtgggattacaggcgttagccaccacgcccagccttgcttttcttttttagagacaaggtctcactctgtcacccaggctggaatgcagtggcatgaccatagctcaatgaagcctgaagtcctggctgaaccaatcttcctgcctcagaccactgtgtagctgggacgacaggtgtgcaccaccatgccagcttatttttattctttgtagagatggagtcttgccttgttgcccaggctggtcccaaactcctggcctcaagcaatcttcctgccttgagaaattacttttaaacgtgttaagaccccacatggccaagtcaagcaggccaggctgctgtttctcagtgtggactgcaggatgcactgctggcctagcgggcaccctcagtgaggggcgtgcccattgtcctgagcccaaccctctggtctgcaaaaagactgagcctggagacactaagggcctgtttccacacctacaaaacagggacaagaactgccccccccagcagagggtacctgcaaaacagccaccaccatctggctcctggccagcacttggaggtgggagctgtctttatgggggtgtccaatcttttgtgaggttcaatttcgtgtcctgaagctggggatgggaggctcaaagccacaaccaccaagtctcagtccagagccagtctccttgccatccttacacctgtccctgcagacagggagtcacctggaaaggccacgctgcgaagccaaccaggccccacgggcaagggggaaagtcacgccctggaagacccggggctgtgcctcagtgctgaaagtggacccagcacgctgcagggcatttcacagccatgctgtgccacataaggtggcccctgccttggcccaggggtatgtgacccatagcaaagctgcatctgaggcctcccaggggcaacacggctgacatttctgacattccccctttccttacaaaagcaccttgttctttccaggatgacaaaacactgacactcaactagcttaacctgtttaaggaggacaggaaacagaacaccctgccgtgccttgcagcgttaaactcccctgcactcgcaggacaatggtgatctatactacagagaagcccaaaccatcaaagctcggggaagggacgtgaagacctgtcacttgacctgtcccggagccacaggaagacagggctgtcactaacccagcataagctctgccacagaatatccctcattgttccccagtaagccactcaacgcccaccaactggcataggggaggctaccccatcaggccaagtgtgccccatctgctcccaccccaggttccaatcaatacctgctgctggccccaaggagccacggggtgaggctggtcaaaccaagggggcttgtttggtgggatctggtcgtgtggcccggggccccgggggccggcagctgcaggatcctggacccctcctggagcttcgtactctgaagagccaggcatctggatgggaggcttgctgtcatctaaatccaagtgacaggcagttagagcaggcctggcagcaggaggcgctgtctcctctccacactaccccagagcaaaccaggctaccgcttttagtgcccagtggatgatcgcttcaggacccactaaaaccatgactatcactggcttccaggaaggggacagggcgaggggaggtttcgaccttgaacatgacacacatctgtccttttcaaagctttacaagaaacaggcctcacttctgccttcttggtttgctgaagaatttctatccacactgaatttgattagacatctttactgtatctaattaaaaggtcatttccccacatctgttattttctattctatacaatcctcatattcctacaacaaatcttctttgatcagaatgtaattttaaaatcctttgctaggccgggtgcggtggctcacgcctgtaatcccagcactttgggaggctgaggtgggtggatcccaaggtcaggagatcgagaccatcctggctaacacggtgaaaccccgtctctactaaaaatacaaaaaagtagctgggcatggttgcgtgcgcctgtagtcctagctactcaggaggctgaggtaggagaatggcgtgaacccaggaagcggagcttgcagtgagctgagatcacgccactgcactccagcctgggcgacagagcaagactccatctcaaaaaaaaatcaaaaacaaaatcctttgctagattctgctaagatttccttcagtatttccgtgtctttttcagaagtgacactagattgtattttctgagacagggtctcgctttgttacccaggctggagtgcagtggtgtaaatgcagctcactgcagcctcaatctcatgggctcaagtgatcctcccacctcagcccccaagtagctgggacgacaggtgagcaccatttttctatttttagtagagacggggtttcaccatgttgcccaggctaatctcaaactcctgggctcaagcgatctgcccatcttggcctcccaaagtgctgggattacaagcgtaagccaccatgcctagccaattatattttcagtctgtgcattgtccttcctgcctgatgtaatagttaccctagtcttggggaatgatctgggtacctttcctctatttcttttctctgggaacaggaaacagatcttctgctgttcaggaatgggatggttgtagttttactctaggatcacctggctcgtgcttgtaaatggatgaaaacctgggcctaggagcaggcctgggacgagggaacaagaactgagtctgagggtggcagactgctttctgactacactcggtgcccagcctctgggggctgtttcctgggggcaggctgagctgagggagccccgtaccaggctgggtggtgggcgggatggcaggggcaggtgctggggccgggggtggagcaggcggtggaggcgtggccttgacttcagcctccatctgcggcatctggagctgctgctgctgctgttgctgctgctgctgctgctgggccaggctggtgacaaactcctcgtgctgcgtcttgagggtctggatctgctgctggaaggccagctgcaccggctggaccactgaggagtactcgttgatgagggtggcctgagagagagaagagcacccgctgctcagtatgcggccttggggctcgctgcctggcgccagaggacaaacgcctggaaagcagcagagcctgggggacctggggcaggtggacagggaaccgtcacgtgaaacagccaacacagtctgggcaatcagtgtgcgctgggatctggccagagatttggggatgaggatgttcgctgcagcgtgttttacgactccctgataacagaacgagcaacgacagccgtgtcctggccgcttcgtggctgctcagcgaacactgcccaccaacattctgggacacgctcatgggctctgcctcccactcgccatgtggctctcagcaagaggggctgccacagcctaagccacgtctgggcttcctcatgcttccaccacaccggaacatgcctgaccaccagagcaaatgggccatgtgcaatgactccgaaaggccgcctggttctagtgttccaggaaagtcagggagacacacctaaggcctgggaaatgtcacctgggactctctggtcaacacacactggctactcctagcacaggcaggggacatgggctctctggctgctggggtggcagctgctgtccccacactcccaaaccctcctggggaacccgccccagctctagggtgaggtgtgggtgggcagggacactcacctggtactgaccaagccccagggctgggctctgtagctgctgaatgatggagtcatcgaagtagccgtttttctcccagagctgcaggagctggcggtgggaggagagagaggccgggtcagtggggaggggaaaggcctgtgtgtcccggtcttgcccaacccccggcccggggcccacgcacccgggcgatcttctgctgcttgtcttcctccacggccaagaagctggtgcagtagatgggcaccacgaccttctgcagggcggccagcagctcccgggcctgcttgcgctggctgtgagggagagactttccgcgcgtcagggccctggggcgggacccggccacgcgcccgttaccatcgcggctccagcctcagcgccctctgccttctcgggaatcgggtccccaacccggtcagggcgatggctgggctcccacgagacctgtgctggtgcctgggctcgaggaagggacagatggaaaaacagcaagcaggggagggagagaacgtggcctggggccgttctgagcaaggccttttggtccagtccccttgataggaaataaccttccctccttccctcttgggtggcgctgcgggtgaagggatatgggccggcgggagcccctgcctgtgtatgatgggcgggatgggactgctgcggagtgggggtcttgtccttgtcactcactatgcacaaggaaacctcggcccaggccaggcctcttgggagaaggagggagggtgcccagtccctcaggaacctagaacactttagaagagtgaccggatgcccagcggggggaggcgccgggcccatgtcctctcagggctgctgtgcagtgctgcacaggacactgtgcatacctggcctgggaggcccctgccgctgcgcagggagatggctgcccctggggagggacgcaagacaggaggggagcagctggaagcccctcagccctcagcttgccgcagggggctcaggggagcaagggcctgggctgggcgagcagcacttggcttcggacagagtagagctagagaggcgcgtggctggagaatgcgggaaactgtgcatccgtgcaaggcacccgactcagaggcagggagaaatggaggcatgaggaggagcagaagggcagagctggtgccgagccgcaactcacttcccagcaggagagaaacagggactgaggtggggaggcaagagggactcaggcagtgctgcatgtgatagatggggcgagatgggtgctggcagcctggcccactgtagaggcacacgaggcgccaggccaggactgctgcccgctaggctcagtagcaatgcttgtctcctcccgcacgtgcgggcctttggcctggggttctattgttttttttttcttttttgctaatttttgtgagaagggccccagtgaccctgtagaaggaaatacccacccaaccttggggagggtggagacagcaacagtgggaagggtgagggctgggtggggacagagggtcggcagatgtggctctgttgaagcctgagagatgggtcagggctggagaaggggatcccaaaggagggtcctgatggctgagcaaagtcaggtgaccgcgtgtgtgtgcgtgcaaatcagtgacgagggcaggagacagacacagaggccaaggaggccgtggctgagaaggcaacaaggagacgccaagaagctgccccatgagaggaaggagtgcaggggacagtggcccccaggagacagcaatgtgacaggtgaggccggggtctaggggagaggacagggcatgcagcgaaggtgcacaggacacctagacctcgcagtcctggagacagaagcctggtggctcacagagaccccccacccggggtccccggacaagtgccccctagtctcgggacaggccaagccaagctaccgaccggagcaagcggccacccaggagggttgaggaggagcgcgaggaagtggcgctctgggcacggggtggcggcgctcaccagtggtgcagcacgtcattgatcaggtagatgaggtgcagccgcagctcgaagtgtgccccatcagccgtgatgcggttccggaggtggccggccatcagctcacagtgcggcggggacttggcattgctgaacatccagttcttcccggcctgcaacaaccgagccaatgacgagtgagcagggccgcggctcccccaggcacccactgcatccctgagagcgcgtcaccatcagctcagggaaggacacaccatgagcgtggggggcacagggtcccacagcctcaggagctccaggcgggagggaagggcacccattgtaacagcccttagcccagattggctacgacaggccctgcctcagggagggaccaagggaaagctgggctctgggaagtgctggcccctcaccgagatggcgtccttggtgcacgtgtcgatgatgggctgcaggaggttgtcaaactcgttcatgtctagctgggtctcctccagaagcttctgcatctgctgctccaccgcgtgggccacggccgctgtcacttgctcctgcgggcgggggtcggtggggtcgagaacacatgaggagggacccgcagcctgagccctccggcctggctcagcaggggcggggtggggacatggtggcgatgcccggactctgggctgctctggccatcagctcccttgcttgtccccagcaggaggagattctgtctctcatgcctgccgtgaatctgtgacagtccctcctggagtgggcagggcactgacaggacataccaggagacaacacctgccctccaggtaaccaaggaaaacactgcagcccagaggaacaaacaacctctgcaaaccaactcaacaaaaaacaaaggcggggcgcggtggctcatgcctgtaatcccagcactttgggaggctgaggcgggaggatcgcttgagcccaggagctccagaccacctgggcaacgtagcgaaacctcatctctacaaaaaataaaatacaaattagttgagcatggtagtgtgtgcctgtgttcccaactacttgggaggctgaggcggaaggattgctggaacccaggagttcaaagttaaacagtgagctgtgactgtaccactgcactccagcctgagtgacacagcaagaccttgtctctaacaacaacaaaacaacaacaacaacaacaacaaaaagaaaagaaaagaaaaaaaaagacaaatgaggcatggtgtgaacgacaggcaatagaagaagaggatacacccatggcctctagtgaagcaagaagggggcaatctcattcctcaagaggaaacaccggttaaagtgcgactggtaaaaacagagctgccatgcggaccagcggtcagttacggctggtcaaggcaggcctcccactccatgatgaacagaagctgagggtgagcattctggaactttcttttcttttcttttttttttttttgagatggaatctcgctctgtcgcccaggctgaagtgcaatggcataatctcagctcactgcaaccgccacttcccgggttcaagcaattctgcctcagtctcccgcgtagctgggactacagacacctgtcactgcacccagctaatttttgtattttttactagagacagggtttcaccatattggccatgctggtctcaaactcctgaccctgtgatccgcctgccttggcctcccagagtgctgggattataggctgagccactgtgcccagctggaattttctgagagcaatatgacagtgtgattttatgccctgaacctagtactgagcgtggggttggtgttttggaggtttggtattctattcctctcatttttctggcaatgcacttgtagtattttatttatttattttttctgagactgagtcttgctcagtcacccaggctggagtgcagtggtgcaatctcagctcatgcaaccttttcctcccaggttgaagcaattctcctgcctcagcctcccaagtagctgggattacaggcgtgcaccaccacgcccagctaatttttgtatttttcatagagacagggtttcatcatgttgaccaggctagcctcgaactcctgacctcatgatctgcccatctcagcctcccaaagtgctgggattacaggtgtgagccaccacacccagccaatgcacctgtattctatttggcgaaagttatcaaactgttggaccaggaaggacaaaagggtccttctggccaggtggatcacctgaggtcaggaatttgagaccagcctggccaacctggtgaaactccatctctactacaaatagaaaaattagccgggtgtggtggtgcatgcctgtaatctcagctactccagaggctgaggcaggagaatcgtttgaactcgggaggtaggggctgcagtgagctgagatcacgcctctgcactccagcctgggcgacagaacaagacttaaaaaaaaaaaagggtccttccccaaccaacagctccaggtgacctagctactgtgtggtggggccaatggtaggcaccagaggctgcctggccacagccattagggagcttcaaggtgcatacgtgccccacagtcccactcaggggggtccaccccagggtgatgggtgcacgcacgtccagtggcttcactgagatgagaagcagcctctgtgtctggcatcagggctgggggtgacagtggctgacatgcaccgagccctgggtggcagggggggccctgtcctcactgacacctgttattcattctgatgagcagacgcaaaaacagaggcacaggggagctgctggtgtctggccgaggaggcggcgggcccatacctgtctgagcgccagcaagtgctgctcctgctgctggaggttccactggctctgctggatgagctcgtccatggatggcgcgccctgggccggcgggatgggcgcggcgggggccagcgggggctgtggcaggggtggcatggtggcggctggctccagctccggggtctgctgcttgcagatgactggagggagaggaggaggggtgccccatgagaatgcagatgggggtctaggtgtccccttggccacctctcagccacaggggcctccccctccccagggactcaccatccacgagggcctgttcatagcctcatgcccacgcaaaccagctcctcctagtctcgggtcctgccctccctctcacaggatcccagcctcagcattccatcttcgggccgtcccctcctcggagaacctaggaagtcccctggccgctctctcgccagcaccatccagtccttgcgcagtgtccttccggtgcaagctaagcttgcctgcccacctcctcacccacctaggccccacctgatgcagaacccaggcctcagtacctctcatcctccgacctcctcggccactccctgacctctgccacttaagctacccattgactgttaagatgtcacagccaccgggcctctgcacatctggccagaaaggcacgaagccgcacccccgagcgcacactgcggcctcccccacacctgccttgtccttctactgactctccttgcttctccagcccttggggacagagacccctctgcattcaggggtgcatccagtttgaggcagcagtgagacacccattctgccggcagaagcctgggtcagggtgggcgcaggtcccaactctggccagatggggcaggtggtgaggtctctgaggaagggacccggctcataaggaggccctggacaagatgacctgcctctctctccgtcttggggccgcctggtctaaatgtgaccaggtacccctggagccctccagagccccactccaaggggaccaggacaaagccaaagataagggaggtggggtgtcaggtggaaggtgtcgcccctcactgggcgctcaagtcaagtctcggggctgactgtgccctccagtttgtgcacccaaagccaccctacaggatgacccccaacttctgcactgaatcccacccctcccactgtctgagggacactgcttattgatatttcttctatctcttatttctccaactcctccctctttacccgtccctccccagcagcatctaaacacattgggctgggcatgatggctcacgcctataatcccagcactttgggaggacaaggcgggtgatcacctgaggtcaggagttcgagaccagcctggccaacatggccctgtctctactgaaaatgcaaaaaattagtcgggcgtggtggcgggcacctgtaatcccagctacctgagaggctgaggcaggagaattgcttgagcttgcaaggtggaggttgcagtgagccgagatggcgccactgcactccagtgtgggtgacagagtgagactccatctcaaaaaataaaaaaggaaataaataaacacatcagaatattctgggttggaaacttctccctttaccccatgatccctctctaaacgatttctcagacaagactcactccagatcttcacctcccctttatctcagcctggtgcctgcttgccactccccgcacccccctccttcccccaggcagctgaggacaccctcactcaactcagccccccgggcctgtcgcaggtgcttgcctcccttggcctccatgtgttcgccccctcagtccctttctccccctttaccaacccctctcccgttggaccctcacatgctggggtgcgcggcctgtgttctgagccctgtcctccgctctacgcaaccgccgggcaacatgagctactcattcctgtggctgcgattgtgcatggtgtgattcctaaatccatcatctccattctggattcctgagctttggccctaaccaccaactgcacggcccactgtgtttccaaggggcctgtgtttcctctcaccccctacacctatgtcccctcctgtgctccccgcaccatggttggcaccaccatctgcccagaaacccaggccagaagtagcatgtgcctcccagtgacgagccacatagtgtcaaggcggcctccgagacatcactccaatcagtctatgtccccgctgtcaccaccatggatctgctgtcacctgcgtcaccccagaaccggtcttcctgcatcaggtcccatccctctacctctttttgacatggcagtcatggtattgccacttatggagtggtccctgggctacccagcggtgacagacggttatggaaccagaaagggagcatttcaaaacctttctagcagcgtgatggttcacggtccacattgttactgtgctttgcagaagttttggtccacacacaacaggttagaaacttaaaacacaacaccagaaatggtccttcaccacagagttcgtgaagctccattctacaacagttgaggcccaggctttaaggcgtggggtgcagaactggctgtactgtggctaacccagcttcacaacacagacctaaaccttccacgagtctctcccacgcttccaggatacactcctcactcctctccaagccaggtccccgactcctccccaagccaggcctccaactcctccccaagccaggctcccaattctgcacccccacctctggccactccaagaacccctcctactctgggcttcagccaccctaagctctgggttccccattccctccaagggctccttcctctgcccggaacacttttctccccttgttttcacctggccaactccaacacaccctttacatctagccaagatatcatcacccacagaaagcacttcttggctgggtacgatggctcacgcctgtaatcccagcactttgggaagccaaggtgggcggatcatgagttcaagagatcaagaccatcctggccaacatggtgaaaccacatctctactaaaaatacaaaaattagctgggtgtggtggcgcacgcctgtagtcccagctacttgggaggctgaggcaggagaatcgcttgaatctgggaggcagaggttgcagtgagccaagatcttgccactgtactccagcctgggcaacaagagcaagactccatctccaaaaaaaaaagaaagcacttcttggcttcaatcttcctgggctataagcataagcaccctctccttcctcataatggcaccagcttccaagtggccacccccccgccccagaaagggaaagcagcccttagctcagtcacccaagccaaagcaccgtctgaggtgtcttcctcccctgctcattacaccatcaggtcgtcaatatgcaactggcgcccaagttcatggattctaccccttcaccccacctgccccccatgctccctccctcaggctcaacctactgacttaattcagaccccaccatctctcacctaaacaactgccctgtttgctcccctgcaggcctcactgctccccaggctggtccctgtagcttgtcctacaccaccggccacacaacccaagccaccctctcccttgtttaaaactcttgtggcttcccgctgcctttagaaacggtttttttttttttttttttgagacggagtctcgctctgtcgcccaggctggagtgcagtggtgcgatctcggctcactgcaagctctgcctcccaggttcacgccattctcctgcctcagcctcccaagtagctgggactacaggcgcccgctaccacgcctggctaattttttgtatttttagtagagacggggtttcaccgtgttagccaggatggtctcgatctcctgacctcgtgatccgcccgcctcggcctcccaaagtgctgggattacaggcgtgagccaccgcgcccggcctagcaacggttttaaacttggtgtgctggggctaaggaaggatcgctctagaaacacataagcacatacaatattttgcttacgatttcaggcagctgatctctctccaccccacccccgcatctcaaacctaaataggcatcagaaaaacccctggattgagtgaaaaaacccaaacttttcccctggcagttaacactccaggtcaaactcttccctcatacaagcacattcttttattaaatagattctctactatgtcacccaggctggagtgcagtggctatttacaggcgtgaggccactactgatcggcacaggagtttcgacctgctccatttctgacctgggccagttcaccaccccttagacagtcgagtggtccccagctcccagggggtcaccatactgacactgaacttactgcacacactcaatcgacacagcgcactacagccctgaactcccgggctcaagcaaccctccagcctcagcctcttgagtagctgggggtacggtgtgtgccactgtgcctggcaatacacacataaactctctctctgtttcttgttcaagaaactgcccctttgcaatgttctactctctcagcctttcaagtttttgttgttgttgttgttagatggagtttcgctgtctcccaggctagagtgcagtggcacgatcttggctcactgcaacctccacctcccaggttcaagcgattctcctgcctcagcctcccgggtagctgggactacaggtgcccaccaccatgcctggctaattttttttgtatttttagtagagatggggtttcaccatgttggccaggctggtctcgaactcctgacctcaagtgatccgcctgactcagcctcctaaagtgctgggattacaggcacaagccactgggcctggcctcctttcaagctgctttttttttttagatggagtctcattctgtcacccaggctggagcgcaatggtgtggtctcggctcaatgcaacctccagctcccaggttcaagcgattcttctgcctcagcctctccagtagctgggactacaggtgtgtgccaccacacctgactaagttttgtaattttagtagagatagggtttcactatgttagccaggctgttctcagactcctaacctcaagtgatctgcccgcttcagcctcccaaagtgctgggattacaggcgtcagccactacgcctggcctcctttcaagccttttctttttctttctttcttttttttttttgagatggagtcttactctgtcactcagactgcagtgcaatggcgtggtcttggcttaccgcaacctccacctcccgggttcaagcgattctcccgcctcagcctcccaagtagctgggactacaggcgcgggccaccacacccggctaatttttgtatttttcgtagaaacagggtttcactatgttggccaggctggtctcagactcctaacctcaagtgatctgcccgccttggactcccaaagtgctgtgattacagtatgagccactgcaacaggcctcctttcaagctgtttaatcgaacaccaactgtgtgttatgtattaagggacaatgaccttgtaccttaatacaagacgagcgtgtagtcccctgaactacacgctcgccgaagccaaacagaccttgtttgggtcattgtaccttaatacataacacacaattggcgttcgatcaaacagcggacaaccacctctcaatgtccatctacctggcaaactcctagttattcatttaaacaatctagagacggggttgggtactgaacgtgacagatgtgatacctgccctgagcagccgcaccacctggtgactatccattattcaaaggccagctctgcttcctaactttaaacttctttagagcaggactggaatcctgttgcctaaatgaacgaacattgataaacacttgccaataactaaaactcagagggataattctttttgatttctgctgcaggcatctgaaatgcacaaaaccttgctggacccacagggagacggcaaagggggctggacagtgcctgtcccatggactcccatccggcctctatcacttcctccctagaaaacactaaaacaatcacgctactcctgctaatctccgtcatcagtctgcaaaacaacagcaaaatccctgatccagagcccaggggggaggatcgaaaacctcgttgttctccattacagtggcacccagcagccgctctgtgcagggccgtgggaacagcggaacagggatcgtgtggaccgagctgctccacttcaaagaataaacgacccgaaagaaagaggtttgtggcagagcccggactggaatccgagaaaggaagcgctcgatgggacggcctgagtgccggaggggactcacgctgctgctgctccagcgccagcttgcacttgtagtaactgtagaattcgcctccgaaaagaaacgagaatttggggttgtccttctgcttctccatagtcatcttctcaaactcgggcccattgcgagccacgaactgggcgagcttgtcgatgacatttcgaagctcctggtctggaggacggagaaaaggccacgcggggcgtcagcgaggaccgcccaaagccgggggactcggcgccccagcccccgtccgccttgccggggaccccaagggggtgggccccgaagaggccgcccttgtacgggtcccgataggggccacacgctcgccgggaatgcggggacccacgggagaggccgcaggcgaagccgcgaggccgagccccgccccctcccagacccggggactccgggaggcggggccggccaataggaggttccggggagagagaaacggtctctcggccggtttgggtctcaccatcggggggcagcggcatctccatggctccggccgcggggaacgtcctccggcgccacacgatcgaccaccagcgccgtctgcggaagccggccggaagtggcgcgagggagccgtttacggcgggcttctagggccgcttccgcccgccacttacggccgtcgctgggaaactccggaagtgagagcgggaggcaggcgggaagaagccgcgcgatgcctggcgcgcgggaggggctagcgacgcgcacgcgcagaagtttcctgacactttcgcagagtgggtccccgtcgcgcggcgccgcggaaaggctggaacggcgcgggtgggtgttagtcgagaccggggggcgcggggcgtgccccttggtcggcgtcgcagcccgatgggctggctggttgctacctccgggcgaccaggggcctggggacttcgtgcctgggccagggtctctttcctttcgcgggcacagtgaggagactgcgaggtgaggtgcgtccgggtggatcccgggctgcggcgactgtcacattctccccggccagaccggaggtggagcagaactgggggcgacgagcttgactgggattgcagctggacgtatttaggttcaaaacatcctcctcctggctttcttccgctccactctttggtcaggaagactggggcggggtaccccccaacccatgccctcaaattgctggcctagagggcacagcgcctttctaaaagctgcagttgggttgcctctaaaataatgaagctaacccttgctaattgtggggaaaagatagccagaagcagcaaatttctgctgtggacgtccgatataaactgatcctcttgagatggttaatgcttagttggctatacctgccccccgcccccgccgcttttttttcctttatccgtttttttttttcttttttcttgagacaaggtcttgctctgtggcccacgctggagtgcagtgtcatgatcatagctcactagccctgaactcctgtgctcaagtaatcctcccgcctcggcctcccaaagtgctaggattataggcatgagctactttacccagcctgtttttttctgtgcaaataaatgcacatgtattttagattagtttcatttttattgttaacagcatttttccaccagatgcttatggattgacaactctacatcaagtgttgctgtaggctaggaatcaacaaaactttttgtataaaagggacagaaagcaaatattttagactctgcaggtcaggaggcaagatcaaggatttttttttttctaaatgtcctctagttcatattttctcatgaagatcgaggatcttaattgtttggtttttttttttttttgagacacagtcttgctctctctcgcccaagctggagtgcagtggtgtgatctcggttcactgcaacctctgcctcccgtgctcaagcaattctcctgcctcagcctccaggggagctgggactacaggtgcgcaccaccacgcccggctaatttttgcatttttagtagagatggggtttcaccaggttggccatgctggtcttgaactcctgacctcacatgatctgcctgccttggcctcccagactgctgggattacaggtgtgagccaccctacccagccttatttaggtatttctataaccagaaagaaaagttcataaaatttttgttggtgaaaatcaaaatatgataactgagtagtttcttaaatacaagttgctacagtttgaatgtttgttcctaatccccagtgaaacagtattaagaggtggagcctttaagaggtgattgggttatgaggtcgtgccattcatgtgttaatggataaataggttatcatgggagtgggactggtttggagcttgcagtgagctgagattgcaccactgcactccagcctgggcgacagagtgagactccatctcaaaaaaaaaaaataaataaaataaataaaataaaataaaaagaggaagaaaggccaggctcagtggctcatgcctgtaattccagcaccttgggaggccaaggcacgcagatcacctgaggtcaggagttcgagaccagcctggccaacatggagaaatcccatctctactaaaaatacaaaaattagccgggcatggtggcggatgcctgtaatcccatctacttgggaggctgaggcacgagaatcacttggacccagaaggcaaaggttgaggtggaggttacagtgagccaaagtcgtgccactgcactccagcctgggcaacagagcaggactccgtttcaaaaaaaaaaggaagagagacctgagcttgcacacagcctgctagccatgtgatgccctgtgctacctcaagactctgcagagtccccaccagcaagaaggcccttgattttggatatctcagcctccagaactgtaagaaataaatttctcttctttaaaaattgcccagtctcaggtgttcttttatagcgatgcaaaatggactaagacccaagtctattcataagagtggaattcttttgggggataacatttcacttaattggggctcccagttgtatttcctgtcgtcaattgatggtacatgttcacctttgaaaaaccttcctggctcacaaaaacaggcggccagttggatgtggtttatagatacggtcatgcacaactcagatctcagctctgctctcaggggactcagtctatggcggggaagagtcccaaaatcagtaaacaaatatatcatctcaaaggtgttattaagaagaggatgctgagactatgatacaagggagggtgaggcccaggctgatagggttgtcaggaaaggctctcgaggtgaggtctgcactatgatctgaacaaggggccagctctaaacaccctaaacaggcagagagaacagtgtgggatcatactgtttatttaaaaaatattttttattttttattttttttgagatggagtttcactcttgttgcccaggctggagtgcaatggcgtgatcgcggctcaccacagcctccgcctcccgggttcaagcaattctcctgcttcagcctctcgagtagctgggattacaggcatgcgacaccacacccggctagttttttatttttagtagagatggggtttctgcctgttggtcagactggcctcaaactcccaacctcaggtgatccacccgcctcagcttcccaaagtgctgggattacaggcatgagccaccgtgcctggccctaaattttttatatatttttttgagacggagtcctgtctgttgcccagcctagagtgctgtggttcaatctcggctcactgcaccttccgcctcccacactcaagtgattctcctgcctcagcctcctaagtagatgggattacaggcgcctgccatcacacccagctaatctttgtatttttagtaaaaacggggtttcaccatgttggccaggctggtcttgaactcctgacctcaactgatttgcctgccctggcttcctaaagtgcagggattacaggcatgagccaccgtgcccagcccatactatttgaagaacagtcagtaatccagagtgtgggcacttttcatgccaggtaaaatctacatgaagaagttttttttgttttttttgttttttttttttttgagacagagtcttgctctgtcacccaggctggagtgcagtggtgtgatctctgctcactgcaacttctgcctctggggttcaagcaattctgcctcagcctcccgagtagctgggactacaggtgcacaccacacccagctaatttttttttttttctgaggagtctcactctgttgcccagaccggagtccagtggtgcagtctctgctcactgcaagctccacctcccgggttcacaccattctcctgcctcagcctcccgagtagctgggactacaggcacccgccaccgcgcccggctaattttttgtatttttagtagagacggggtttcaccgtgttagccaggatggtctcaatctcctgacctcgtgatccgcccacctcggcctcccaaagtgctgggattacaggcgtgagccactgcgcccggcctacccccagctaatttttgtatttttagtagagatggtttcaccatgttggccaggctggtctaaaactcctgacctcaggtgatccacctgcctcggcctcccaaagtgctgggattacaggtgtgagccaccgtgcccggctacatcaaggagttttaacttgggatctccaatggatagatttcagagaaccatgaacaaaattggtagcaaaataaatgcctttttgagggttgaagatacacagcgtttacaggattcttaataggctcctcaatcagaacaggttaatgaatctgtattgtcatttttttttttttttagacagagtctcactctgttgcctaggctggagtgcagtagcatgatctcggctcactgcaacctccgcctcccaagttcaagagattctcctgcctcagcctcctgagtagctgggattataggcatgtgccatgacacccagctaatttttgtatttttagtagagacagggtttcaccatgctggccaggctggtcttgaactcctgacctcgtgatccacccgcctcggcctcctaaagtgttggcatgacagacgtgagctgctgcgcccgggcgatgttgtgatttttgaggctgcataggatgccatggtgtggactcaccacaatttactgaagtgagactctagtctcctggcttggttccatttttaggccactgttaaaagtgtcttaagtgtatatagggttgggcgtggaggttcacgcctgtaatcccaggacttttggaggccaaggcgggcagatcacttgaggccaggagttcgagaccagcctggccaacatggagaaatcccgtttctactaaaaaataaataattagccgggcgtggtggcacgtgcctgtaatcccagctactcgggaggctgaggcaggagactcacttgagtctggaggtggaggttgtagtaagccgagactgcaccactgtactctagcctgggcaacagagtgactctgtctcaaaaaaaaagtgtcttagtagatacaaaccttgtgtagagtcaaagggtgtgcaaattcaatactgagattgctcagctaccttctagaaagttagtacacccacggtcactactttcatacatttgtttcagattgtttaaaatgctgctgggtatggtggctcatgcctgtaatcccagcactttgggaggctgaggcaggcggctcacttaagtcaggatttcgagaccagcctggccaacatggtgaaaccccatctctactaaaaatacaaaaattagccgggcgtgggggcaggcacctttaattccagctaatcaggaggctgaggcaggataatcacttgaacctgggaggggaaggttgcagcaaaccgagattgcgccactgccctctagcctgggtgacagagcgagactctgtctcaaaacaaaaacagaaacaaaaaagccatgtatctgagattgaaaatataagcctcagagggacctctaccaagctcatttcaaagggtcaaatcagaatctactggtcagaagaaagcagtagaaagagctggtagactggctgctgcagatactctccagcaagtaaagtggacacctcgagtgagatgagccttgtgaagggactcacctaagcagcaacatggagggccaggtgcactgagggggttctgtggcccatatgtctgctagttgtgatttcttgagtctggaccccttaatcggaatggtctcattgtggtcagggtcagatggtaactaaagttttgtggggttttattgaagacagggtctcgctctgtcacccaggctggagtgtagcagtgcgatctcggctcactgcaacctctgcctcccacgttcaagcgattctcctgcctcagcctcccaagtagctgggattacaggagcgtgccaccacgcctggctagttttttgtatttttagtcgagatgggctttcactatgttggccaggctggttttgcactcctgacctcaggtgatctgcccaccttggcttcccaaaatattaggattacaggcgtaagccctgccacctccccctagtcccccatcccccgggtcttagcatttctaagtagctcccatgtgctacttagttacatacctgtcatttaggctgagtgctttgaaggtaggaggcttacatatctgtttcctgctgcttgacacagccagtgcttagtaaatcactaaacaaaaagattatgaatgaaaaggacatgggcaacagtttcagcagaaactcaaaccctttctgtctgaaagaaatcctttgctggggatggcttaagtaatggggaaaaatgggttctggagccagatttaagcagttatgtaatcccagatgagtgacttgaccccgttgggcctcattttcacctgaaaaacaaggctaataaaactcacaaaggtatcgtgtgtgaaaagctcaccactgagctgggcatgtagcaggtacacagtcttggctgtcaatactcaaaaatggcttcaggctgggcacggtggctcacacctgtaatcccaacactatgggagccaaggcaggtggatcacttgagcccaggagttccggaccagcctgggtaacacagagccccatctctaaaaatattttaaaaattagctgggtgtggtagtgtacacctggaccagctacttgggaggctgaggcaggggactggaatgtagggtttggtgctgcaggaagctgtggtcgtgccaccgcagtccagcttgggtaataaggtgagaccctgtctcttaaaccaaaaacataacaggccagatagcttgagccccagagtttgagactagcctgggcaacaaggtgaaactccatctttacaaaaaatacaaaaattagccaggtttggtggcacatgcctgtatcccagctacttgggaggctgaggcggaaggatcccttgagtctgggaggttgtggctgctgagagccgggattgcgccactgtactccagcctgggcgacagaatgagatcctgtctcaaaaaacatgaaacataccaaaaaaaaaaaaaaaagtttcataagcacagctgccacaatgttcctggacttcccatgttattccgttcaataaagtcacgtcattaatttagctgtgatcctattttcattgtatcatctaatcaattcacaaattgcacgtccttatttttggctcagaagaaaaaacaaaggttgcagtaaatccagacgtgacagccaagttggcttgctctttctcctccttccacattttgttgctgggcacactgaagacagggccactcaaaaagagaccctcgctgacaaatcgggaccaattttgattccctggaaaccatcatttatttttggtaaatgccagtgaggaatatacacgtcattcctgcagaaaagtctatagcatttaagtcttgaaaacaggtgacaattgaaaaacattataatattttcaggtcttttaataattcaatgctctgtgtccttcaggctgtgagaccctaaggtattggggtctggtaatgtcccagctatagcaaagggcctgttgggtgacataggacaaatatacagcaaaattcagaaactgcaagtgcttcctcacttgaacggatctggcccctttgtggtaggggcttgactgttcctagaatgaatgacttaaaataaggtggttaaaaattctgcagtgagtctcgccatggtgaacaaacatgattcagaaatgcctccttctataaaatgaaggagctgggttggagtcagtattaccagccagaccataccctgatgggtaaaggaaattctctaccacagagctcagcagtgaggtggctgagaggaaggcaggcctgcagatgaaagcgtgggagtggagcatgtggggcgggcactgtccggctgggaaaacccagccttcaagaggccattgtcaatcaggctgggcacggtggctcatgcctgtcatcctagcactttgggaggccaaggtgggcggatcatttgaggccaggagttcgagaccagcctggccaacatggtgaaaccctgtctctactaaaaacacaaaaaattagccagccgtggtggtgcatgcctgtaatcccagctactcgggaggctgaggcacgagaatcacctgaacccgggggatggaggttgtagtgagctgagactgcgccactgcactccagcctgagcaacaaagcaagactccatcttggcagggggcggggggatgtggaccttcaagtctcagaaatatgtgtttgtcttttgatctgctgatttggtgtaacgtgattgcctcattcattccagtgtacgtacttgctgtaaatttatatacagaattaaatagcccatttattaatttataaaccataataaaaccagacagtcatttcccgtcaccagcagatcttgcattggaaaaggaaaataatatacaaatttcagcaacttcagagatttcaggaagcctgaatggaggtcgaattcattttggagttcaataatatgttcaaagaatcaggtactatatataatcatatagacaactcccgtaatatctccgcagtgcaaaattatccctgtttcttgtcattcaccagtgagaaaaatccaactgcagacttgactgccttcggtgaaggcacacggcaagttcttctgacaaataacaccctttgggattgactcttcacgttttacacagcaattgtctcagcttgggaccaaagtatttacaaagcaagcgaacaagagacgaagcaagagggacacttctgaggccggtggtgcggaaactcaccgccaaacagggtggggggccagtcacctcttcaggagtgtcccatgtgtcagctgacataacatcttaaatacagaattccaattgaaagaaaaacaaacaacaacaaaagaaacaccagtcaagcataagtgatgttacttcctctctgaacagggaaacatctcgctcgctgggagataaaaggtaaatctctcatttgctgctctcttcccctaagtgccagcaagaagctgggtgtggtgatgaagaaagaaggcagccatcacctaagaccccacaagccaagccgtggtcccctccgtgagggcacggtcctttcatgaagccgtaaaagagaccacagctcggacctgagcactcagggttacctactggggtcttgtcatattccttatgttgatttctgccaagacccaaactgattccttttttttttttttttttttgagacagagtctcactctgtcaccaaggctggagtgcagtggtgtgatctcagctcgctgaaacctccacctcctgggctcaagtgattctcctgcctcagcctcccaagtagctgggattacaggcaggtgccaccatgcctggctaatttttgttttagtagagatggggtttcaccatgttggccagggtggtctcaaactccagtgatccacccacctcagcctcccaaagtgctgagattacaggcatgagccaccacgcctggccccaaactgactcttgaccaaagaatctgatttggcaaaccaaatcttagtgcagtgttcgctcctcgtccccttacccagaacatgattcagatcctaacataaacacaaaaacaggtcagggaaccaaaacactgtggtcttgtctattatacaaaatattgagataatgttcacgattcattctgttttcagcaattgtgacaattttgaagcttctctcgaagcttcgaaacacttcatttcctactaaataccaaaacgtgtcagacaggcatcaccagtgggaacttggttttgttttgtttttttttttgagatggagtctcgctctgttacccaggctggagtgcacaatctcggctcaccacaacttctgcctcccaggttcaagcaattcgcctgcctcagcagcctgaggagctgggactacaggcacgcgacaccatgcccggctaatttctgtatttttagtagagatggggtttcactatgttggccaggctggtctcgaactcctgacctcgtgatccgcccatcttggcctcccaaagtgctgggattacaggtgtgagccactgtgcctggccggggaactttgtttttaaacgtttacaaacaaaaagattttcgatgcataggccagtcctaatgcatcccataatggggaccaaggcaaaaacacacacacacaactacaaaatattccctagaaaaatgcaagatcctccgaaaatcaagatctctctaccaaacaacataccaagtcatcacagaagaggtgaagatgcctctcaaaagacatgtgccacagaaatagagcttgaaatactgaacacgatttctcgaagatccttctcaccaccccaagagaagcgccctgctctggtgagggaagaggaggcaaaggagaagagagaagtttcccttccatctggatctgggtggatgccaaccctgacgtgcagggcagagcaccaggctgcaggaactggatgctaattgcaatcgctttttgctttggaacatttgccaggaacttgtgaactgctaaggggatgaccaggaaactggatccatctctgtggctggggatgttttgaatgattctcgcgggctccctgtctgcttggtgaccctgttggtcctatgcgtatctgcgccagggaattaaactagccagtctgacgttctcaagcaccgccctggacacccccactgccagttcatggtctacagccacagtgaccccagcttttcacacaggtcctgaatgttatctggaatgcagacacaagtgctctgagctacactgcttggggaataattccacatggaaaggtacaacgtggccaagatctccgcagggacacggccctcagatgacagactccaggaagaaagagcatgagacactggtctctgtttaggtttgcccagagctcacggccgtctgcactgcaggcaacgcatcctcctgcggctcacggggggccaggaaccccagggcttctgatggagagttatgcaccgtcccctcggctgggttgtacattcactgattgtcagaagtttctgatactgctgtgggggccggggaaggagtcaccaacagtctggtcctgtcctttggactctacacatcatagcggttcaaactgtacgagtttgggtagctctgccggctgtattggaagtggtctgttaagatgttgttgcggccgtactgatagtccccgtgctgggggaagaggaggccgttgtggggcttctccagtgggctccggtgacgctccttgctgctcaggtctgctgtggtgacggggaggaggtgcttcctggcttgctggtttgcatcgtacttggtctgtgccagaaagagagcaatgagacaggacatgcccggggcataagagctcgtaattcaaagtcaatcaactggctggctgcggtggctcacacctgtaatcccagcactttgggaggtcgaggcgggaggatcacctgagctcaggagtttgagaccagcctgggcaacatggcaaaaccccgtctctactaaaaatacaaaaaattaaccgggtgtggtggcgcatgctgtagttccagctactcaggcgttctgaggcacaagaatcacttgaacccaggaggcggaggttgcagtgagctgggaccataccactgcactccagcctgggagacagagcaagacgctgtctcagaaaaaaaaaaaaaaaaaaaaaaagtcagttaacctccggggccggcataagtcatagggcttgagcaaggaaagcagacttgaatggaccagaccacagtgcatggacagactcagaagacaagtccttggccaggcgcagtggcttatgcctgtagttcaagtgctttgggaggcctaggcgggaggatcacttgaggctaggagttggagaccagactggacaaaatagagagaccccatatctacatgtgttaagaaacaaatgaagaggccaggtgtggtggctcatgcctgtaatccctacactttgggaggccaaggcaggtggatcaactgaggtcaggagttggaggctggcctggccaagatggtgaaaccccatctctactaaaaatacaaaaattagccaggtgtggtaggcgcctgtagtcccagctactcgggaggctgaggcaggagaatcgcttgaccccgggaggcggaggttgcagtaagctgggatggagcgccactgcaatccagcctgggtgacagagccagactccatctcgaaaaaaaaaaaaaaaaaaaagaaaaggaaaagaaggcaagccctccctgttggccatcccatgtccttacaccgcactaaacagagcctttgagaggagggagggaaaaccccagctgagacacagccggaatgatttgaggacctgaggttgcctatgcaggaaaaaggaagccagagtgggatggggctacgccaagatcataaaccagtcagtggcaaagctctgacatacaaccccagccttgagcgcccgggaggcccttccttttctgacttcctgggtgttggggggccggcttccttccctgcccagcctctcagactctcaccttgttatagaggaagacccccaggatggcggtcatcatgcccaggacgttggtgctggtgactgggttgcgcagcatgatcagggacaccgtgatgaccatgattcttttggtggcattggcgaccgagtagctcagggggctaacgaggttgaggatgctgaaggcgataacattctgggcaaagttacagaagccgctgacagccaggagcaggagcgtccagggccactggtagacgtaggtctgcagagaccggaaggtaaagacagcacttcagtgggcagcggtgaccctgcctccctgtatccacctggcagggttaggggaagggatgtggaggggctcatctggagcctcatggtccacaggcagccagtccagatgtgtcaccaagagacactaggtgctttaggtccatgacctcagaacctcatgacaccacacagcatgggaatcacccgccgtctcctgccaaggaaacaggtgaagccaggtccccaaagggcaccaagcaagacgtaagccaaagccttccctggcagtgaacagccaggaaccctgggtttggcaaagcagggatctgcttgttggacgcaatgcattctacagggttggaggtcctgggaaggtggctctgagcctgcgaagtacctggtaatacgaaagccacgggtctgcacctattgctgcgaggatgaacagaatcatggcttttgaagtgctttacaacaatctcaagccaaacaaacacaagaggtgacgttaccatcaacagctgaggccaggtgcagtggctcacacctgtaatcccagcactttgggaggccgatgcagctggatcatctgaggtcaggagttcaagaccagcctgaccaacatggtaaaactgtgtctctattaaaaatacaaaattggtcgggtgtggtgtggtgtggtggcgcatgcctgtaatcccagctgaggcaggacaatctcttgaacctgggaggtggaggttgcagtgagctgagattgcaccactgcactccagccagggcaacagagcgagactctgtctcaaaaaaacaaacaaaaaaaccagtttaggttgggcgtggtggctcatgcctgtaatcccagcactctgggaggctaaggaaaaaaaatcattcgagggcagcctgggcaacacagtgagaccctgtctctacaaaaaaaaaaaaaaattagccaggcatggtggtgcacacctgtggtcccagctacctgggaggctgaggtgggaggatcgcttgagcctaggagttcaaggctacagtgagctacgatggcgccatagcaccccagcctgggcgacagtgtaagacactgtttcaaaaaaaccccacaaaactttaccatctgaccctgaccagaatgaggccattctgactaagggatccagaaattaagaaatcacaactagcagacatcgggaccatggaatcccccaaagagcctaggctggtcccaggacaggcagacaggtgagaaccaggtagacactgccctgtaggccaatttccaggccacgctgaccttggccacaggaggacagagctggctcagcccagggtgaccgtgattggcggccctgctggagctgcaggatgtctacctgactccatctccactgcactccaagagagaaggatcacacggtcctctcaaatgcaagaagacacgcttaggcgaccagctcaatgtcaaccaactcaagactggaactcccaaatgcaaatccatttacctgtgccatacaccctgcagcttctgcggggaacctcactggaggaatagcccctgtaatatatatgagcccaccaggatgccttcatgttgggccagcctgttctcccaggggtcgctccctaaggtgatcggttaggatttccatgctattttcttcctgcttgcatagatatctatcttctgggaagggaacccaaccaatctggtttaaaacaaaaaaaaagatacataataaaatggactgatttggcagcacggtgcacaattccaggcatttttttttttttgagacagagttttgctctgtcgcccaggctggagtgcagtggcgcgatctctgctcactgcaagctccgcctcctgggttcacgccattctcctgcctcagcctcccgagtagccgggactacaggcgcccgccaccgcgcccggctaattttttgtatttttagtagagacggggtttcaccgtgttagccaggatggtctcgatctcctgacctcgtgatccacctgcctcggcctcccaaagtgctgggattactggcatgagccaccacgcctggccaattccaggcattttaacaaatgcatcaattcatggaaccaccatgaccatcagggattaggacactcctggggggcttctcttttgtcctaaccccctcctcctaaacctggcaaccatccatgttttctgtcatgatccgtgtgtccttgggagactgtcatggagctggaatcacatggctgggaacctttggagacaggctgctttcactcagtgtggcaactctgccattcatccatgttgtgagggacaagagttggtaccttttcattgctgagtaatgctccactgtgtgtaacattccatgtactgaagttttttgttttgttttgttttgagacggagtcttgctctgtcacctaggctgcagtgcagtggtgggatctctgcttacagtaagctccgcctcctgggttcacgccattctcctgcctcagcctcccgcatagctgggactacaggcgcccgccaccatgcccggctaattgttgtatttttagtagagacagggtttcatcgtgttagccaggatggtgaagttttttttttgtttttgtttttttttgagatagagttttgctcttgtcaccctggctggagtgcaatggtgcgatctcagctcactgcaacctctgcctcccgggttcaagtgattctcctgtttcagcctcccgagtagctgggattacaggcaaccaccaccatgcccagctaatttttgtatttttagtagagatggggtttcaccatgttggccaggctggtctcgaactcctgacctcaggtgatccgcccaccttggcctcccaaagtgctgggactacaggtgtgagccaccacacccggcctattttttcttgagacggagtctcactctgtcacccaggttggagtgcagtggcacgatcttggctcactgcaacctctgcctcccaggttcaagcaattcacctgcctcagcctgccaagtagctgggactacaggtgtgccgcaccacacctggctaatttttctatttttagtagaggaggagtttcactatattgggcaggctggtctcgaactcctgacctcaagtgatccacctggctcggccttccaaagtgctgggattggattatatgcatgaaccactgcacccagccatctgtccattgtcttctgatctaatttctctctgttgtttaaactggataatgtagactgatttatcttcaagttattggctccttcctctgttacctccattccgcttttcagtccatcccttgagttttttttttttttttttgagatggactctcgctctgtcgcccaggctggagtgcaacagcatggtcttggctcactgcaacctccgcctcccacgttcaagcagttctcctgcctcagccttctgagtagctgggattacaggcacgtgccaccacgcccagctaatttttgtatttttagtagagacggggtttctccatgttggtcaggctggtcttgaactcctgaccttgtgatccatctgccttggcctcccaaagttctgggattacaggcatgagccaccacgcccagccaatcccgtgagtttttaagttactatcttccatttaaaaatttctggcctccagcctggccaacatggtgaaaccccatctctactaaaaatataaaaattagccaggcatggtggcaggcgcctgtaatcccagttgctcgggaggctgaggtaggagaatcacttgagcctgggaggcagaggttgcagtgagccgagatcccgccactgcactccagcctgggtgacagagcaagactccgtctaagggaaaaaaaagaaaatttctagccaagtttggtggctcatgtctatagtcccagcactttgggaggctgaggcgggtggatcacttaagcccagaagtttgagaccagactgggcaatatggcaaaaccttctttctacaaaaaatacacacacacacacacacacacacacacacacacacagagttaaccagatatgctggtgtgaacgtgtagtcccagctactcaagaggttgaggtgggaggatcactgagcccagagaggttgaggtggcagtgagctgtgattgtaccactgcactccagcctgagcacagaatgagaccctctctcaaaggaatttaaaaaatttccatttggttcttcactctatcttctatctgttcacatttgtctccagagtctttactttgctccttggagcacgatggtaatcactgctttaaagtctgtctgataatcccaacatctgtatcattgcactgttggcccttgttgattgtcttttcccaaccacctggaatttcctgggtcttcgtaaactacgtaattttggctggaatcccgggcatttcgcatattataaaagtctgggtcttatttaaatcctatgaagaatgttgatgttttgttttagcaggcaattgatgatgctgggttcaggctgcaggcttgaccagccttctgtgggttgtggttccaatgtcagttatgttttcaaagcctttccagtggtatttggctctgtcctgagtctgtgccgcctgtggtcagtctgaaagccaagcggtggtctctcccacagttctgttcttagtctttggtatgctgtttaagatctcatcctcacatgtgtgacgctcaggggcgagcctgggattccatgggcgactttatgaggtcgctgtcctcagctcctccctccacacaatctcctgagtactttctagtttcctagtccctccctttcatggccctccagtcagaaagctgaggtttaatcaccgtactctgctgttcacttcctgtgattacacccccatttgagggtcaagcagtgacagtacagagaacaagctgcaaaagggctcatcccatcctctgaggactatatgtcctcaaacagcagaggaagagtcgcccttctcagggttttaggtggctgtggaacctgctgctgctgccaccaacgtaggattgtcaggagcctgggaagcaagagatgaaggcaaaaaagaaaatagaaaaaaacctaacagacagccgggcgtgccggctggcgcctgtaatcccggcactttgggaggctgaggcagggagatgatctgaggtcaggagttcgagaccagcctggccaacatggtgaaaccccgtctctactaaaaacacaaaaattagccaggagtggtggtgcgcgcctacaattccagctactcaggaagctgaggtgggagaatcacttgaacctgggaggtggaggttagagtaagctaagatcgtgccactgcactccagtctgggtgacagagtgagactccatctcaaaaacaaaaaaaaaaaaccaaaaaaaaaaaaaaaaaaagagaaaaagcctaacaggcatccaggtgtggtggctcacgcctgtaatcctatctctttgggaggtcgaggcaggcagatcacctgaggtcgggagttcaagaccagcctggccaacatggtgaaacccatctctactaaaaaaaaaaaaagaatacataaaaattagctgggcatgatggcatgtgcctgtaatcccagctatatgggaggctggggcaggacaatctcttgaaccctggaggcagaggttgcagcgagctgagatcacgccactgcgctccagcctgggcaacagatcaagactccatctcaaaaaaaaaaaaaaaaaaaaaaaaaaaaaagaaagaaaagaaaagagaaagcctaacaggggatttcctccattctctctgagggttaggagtctcctttcccattctccagactccaagcagagaacatctctgttctcattcagtgcccacatctaccttctgagctgcctcatgtccaggctgaagacacaggaggaagaagaatgacgaactcactggtggctccaaggcactctgaattctggtctttcctccgcccatctgcctgctaccatttatttctcggttctcaagtagctgcttcatgcattctgtccaagttttgaaaccaggccacctgctccagagtctaggaatccccgcctgtcttttgccaagccatttggcaactgggccaggcgtctctgggaactgcccactgcagcctttgattcttggtagactggagagcagcagacaccagctgacattctcccatctcatcctcttcccgcctgttctggagaacaggactgcgacggtgctaactaacctgctgtctgtgtagtctatgtgggagacacaagacaaagagggggaacccagacatgtgggaaccccatcttcagactgcaacattagtgaatatggtgtatgcctagggctgctattaaaatacacaaagtcatgctcatgttaaaaaacatatgggccaagtgtggtggctcacagctgtaatcccagcactttgagaggccaaggcgggaggatggcttaaggccaggagttcaagaccaacctaggcaacagtgggagacagtctctacgaaaaaaaagaaccaaccaaacaaaacaccaccaaacataacatacatagcctcaactaaaaaaaaaaggttacttaaggtattacaacaacaaaaaagataatgactagaacaacaataacaacacaaaatgtcctaagtgcaagaaaagcaaagacaaaaaaacacagcaaaagcctgtatgtttctgtccatgtgtggacacatacatactctaatgagctgtaacacagaacagcagaggaactgacaggaaacccactgacactattacacagccgtacaagaaatgagaaaggccttctatgtcgttatgaagagctctctgggacgatgagatgaaatgaacaaggtgcagaatagttcagctccccttcagtatccacggaggactggttctagggacccctgcggatgccaaaatctacagatattcaagtcccttttataaaatggtttagtatttgcatgtaatccatgcacatcctcccatatacttgaaatcatcgctagattacttgtaatccctaatacaataaaactgctatacaaataattgttatactgtattattttaaaatgtcttattctttattatagtattttgtttttctaccatatattttcaattcgcagttggctgaatccactagtgtggaacccacagatatggaaggatgactgtatgtttatatttatttttgagatagggtcttgctctgtcatgctggctggggtgcagtggctcaaacatggctcactgcagctttgaccttcccgggctcaagtgatcttcccacctcaggctcccaagtagctcggactacaggcatgtgccaccatgccgggttaatttttggttttgttttacgtagagacggggtttcaccatgttgaccaggctggtctcaaactcctgaggctaaagcagtctgcctgcctctgccttccaaaatactgggattacatgtgtgaggcactgtgcctgacctgtaaatttaaaaagctactttttgggctgggcgtggtcgcttacgcctataattccagcactttgggaggccgaagtgggtggatcacctaatgtcaggagtttgagactagcctggccaaaatggagaaaccccacctctagtaaaaacacacaaaaaattagctgggcgcggtggtgggtgtctgtagtcccagctactcgggaggctgaggcaggagaactgcttgaatccgggaggcggaggctgcagtgagccgagaacatgccattgcattctagcctaggagacagaaaaactccgtctcaaaaaataaaataaaataaaataaaataataaaataaaaagctactctgtgtgtaataaggacagagggtgattatacatgcaaatttgcttatatttgcaaaaatatggaacaggtgaactaggagcctaagaaatgttatccatggtcagggaggggacagggagagtacaggaatcatgaccagacttcttctttttttttatttttatgagacagtctcactttgtcacccaggttggagtgcagtgtcgtgatctcagctcactgcaacctccacctacctagtagctaggattataggcgtacgccaccacaccagataatttttatattttttctagagatggggtttccccacgttggccaggctggtttcgaactcctggcctcaagggatccacctacctcggtctcctaaagtgctgggattccaggtgtgagccaccacacccagcctgcaaagaaatactaaccttttctcagcactccagttgcaattgtgctgtgagaatgctcattctgaagcaattatatgagtgagtgtacagtagaataacatcagtgaataacgggtagaataagcaactaagaaacgaggagcggaaccaagcataccagcgacgagatctaaatatgaaattcaaaacagcaaagatctggactgttcaactgaaagtgacgctaattgctaggaactctttgctgctgccccaagtgtgtacttcctaatttttcacagtaaaggcctaacaacaatgaccacccagcagcaaaaagcacccatggcacctggattgtgtctctaaataccgctccccactaacggcacctggagtcctgaaggaggggctgactgcagctctgggatgggaagtacacaaggtgaaggcgggcatcccgctgggagaaacgctgacccacagtgctagaagggcaaggagccaatcagaagggctccaatggctaagacaggacaatttttttttcttctttttttttaagatggagtctcgctctgtcgcccaggctggagtgcagtggtacgatctcagctcaccgcaacctccgccttccaggttcaagcaattctcctgcctcagcctcctgagtagctgggattacaggcgtgcaccaccatgcctggcaaatttttgtattttctgtagagatggggtttcaccacgttggccaggctggtcttgaactcctgacctcaagtgatctgcccacctcggcctcccaaagtgctgggattacaggctggagccactgcgcctggccaagacaggacaatttgactaggaaaacgaataattcatgcaactgacaaacacataaaagttcacaatgatgctggagaaaaaaagagaaccccttccctacccccaaacaaaccctcaactctggtcaacatttggagtaagctccaactctctatcctgaaaattagtcatcaaaaggaacagttaagcattaaactgcctttctcgtaccatacttcaaggtaacaaactagtcctggaagatggaaagttcttcacagaagaattacagctcatcaatgtgaaacgaaagttagaaaagtgagccatggtttactgattgggaaaatagaggtaatatccactacttcagcaggtggagccaaggattaaagataagaaatgtcacaaatccagctagaccacattaagacctcaataaatatttacttttcctttctaactcgagtctggaagaatcgcactggcctcctcctcaccgcaggcacttgcattcatttataacacattctctgaaggcagaccctgcaggtggcaaaaagattcgacgtggagtaaatggaaacagagaccagggaggaactgagctgcacagttttctttctttcttttttttttttgagacggagcttcacacttgttgcccaggctggagtgcagtggtgcgatctcggctcactgcaaactctgcctcctgggttcaagcgattctcccacctcagcctcccaagtggctgggattacaggcgtgcaccaccacgcctggctaattttgtatttttagtagagacaggatttcaccatattggtcaggctggtctcgaactcctgacctcaaatgattcacacaccttggcctcccaaagtgctgggattataggcgtaagccaccacacccaggcagcgcatgtttttttcttttttttttgacacggagtctccctctgtcacccaggctggagtgcagtggcaccatctcggctcactgcaaccgccacatcctgggttcaagcaattcttctgcctcagcctcccaagtagctgggactacaggtgcgagccaccatgcctggctaatttttgtatttttgggagaaacagggtgtcaccatattggccaggctggtctcaaactcctgacctcgtgatccgcccgccttggcctcccagagtgctgggattacaggcgtgagccactgcgcccggctttttttttttttttttttttttttggccagtgcatagttttcaaagttccagggctggcaaggcacagtggctcacatctgtaatcccagcactttgggaggccaaggcagatctcttaacgccaggagttcaggaccagcctgggcaacatagtgagaccctgtctctccaaaaacagtaaaaaaacaaaaatcaaacaaaaaaaaattagccaggcatggtggtattcgcctgcagtcccagttactcgggaggctgtgggaggatcgcttgagccccggattgaggtcaaggctgcagtgagccatgattgtgccactgcactccagccctggcaacagagcgaggttctgtctctaaaaaataaacatttaaaataaaaaatgagtaaaaataaaaagtcaatgtgctatctggactatactgtcaggaggtgaaagagtcaccttctcttccttgacgctactggcgcacacacagcagctatcagcacctgggatcaagcacaccagagaaggaaatacacaggaaacccacttcctcgatggcgtgcatcgtcaccgtgaggcattacagaggactgactgctgaaagcgctggctgtcaggtgcccaaaagataccacaatgttaacatgcagctacagctcctcaacaaagcacctattctggaactagccaagaaaatggcgtgttcttggtgctgtacaactcaccaagtcgctgctgaccaggaaagccgagaggtccaccagaacccaggtggggatcataaagaagacggcgtggcagcccaggatgttgagcagccggagatggtggatccgtgaatctcgcaagacctggaaagggaaagcctctttagagggtgattaaaactatatgtggcaaaaagggctccagtgactcaggccccaaacacagtgactggacattaaccctgacatctgagcttggacaccaaacctgcaagtgcatttgtgaggacatacacagcacaggcctgaaacaagcaccatgctccacgcataaacgactgagaaaagaaaacaaaaataaaacagtaacactcagtgctggtgaggatgaagtgaagtaggcactctgaaattccactggtttgaggctgaattggtataacctttctaaaatacgaccagacaaaccatattaagagtgattaacgtttcataccctctaacctgagaactgtaagcctatcataatgaaataactgagacaggaaaacatcacacacgtgattgtttctacattacaatgaaaagttggaaataagtggtatttccaatagagagactgcattaactgtggtacctgaaaagtgtgtgattatcacaggagttaagagcaatttttttttttgagacggggtctcactctattcctattgcctaggctggtctcgaactcctagcctcaagtgatcctcctgccttggcctcccaaagtgctgggattatagatgtgagccactgcactaggcttcaacaagttttaaaatcttgttttaaattgaagtttttagctaggcctggtggctaatgcctgtaatcccagtgctttatgaggctgaggtgtgaggatcacttgagcttcgaagactgaggctgcagtaagctatgattgtgccactgcactccagcctgggcgacagtgagccttggtctcaataaaagagcttttctttatttttttcttattgagcacattaactttataatagaaaaacttttttttgtttttgagatggagactcactcttgcccaggttggagtgcagtgatgcaaaatctcagctcactgcaagccccgcttcctgggttcaagcaattcttgtgcctcagtgtctggagtagctgggattacagatgcgtgcctggctaatttttatgtttttagtagagatggggttttgccatattggtcaggctggtgttgaactcctggcctcaagtgaaccgcccgccttggcctcccaaagtgctgggattataggcatgagccactgcgcccggccagaaaaacaaactatttaaaaagcaaaatgacaaacagaaaatcagcagaatggcaatcaagatttttctgctctaatagcaaagaaatttctactccgcctgttttcccaatgccaccagtttgctgcccgcacacccctgaaaccccatgcatgtccgctgatggtgaccaaatacctttttggagaaaatgttctgaagcgagaagcacagcgtggcggcgagggcgctgacgagtccccacatgtcaaaagacaactcggtgacggtggccagcaggacaccgctgatgatggggatgagtgacaagtatacctgcaggaagaggtcatcaagaagggctcacaggccagactagagctgggccacatgccacagatgcccagggaagagcccctctcctccctcagcaaagggataccacctaacactttgaaagtggtgtttgctgtgccagtgacgctctggtgggtggctgggggcaggtggttatcagagcgccaggggcagggcttatttgtgggtagccccatccccataccgtcacccccattaagagcctctgctcagggccacagcccggggctggtcctaactccacagatctgttcagctgccactgacgcaccagggtttgaagccctgatcctctataaggctcccccattccctctttttaaaaaatagtttttttgagacaaagtctcgctctgtcgcccaggctggagtgtagtggcacaatcgtggctcactgcaacctctgcttcccgggttcaagcgattctcctgcctcagactccccagtagctgggattacagggatgtgccaccacgcccggccaatttttttgtacttttagtagagacaggatttcgccatgttagccaggctagtcttgaacgcctgatccacgtcatccatccaccttggcctcccaaagtactgggattacaggtgtgagccactgtgcccagcccccattccctcttacttcaggctcttccagtatggttactcctggctggcacactccactgatgccttctcctcccagtgacctcctgcctccacaaggagtgctttctccaacccacctccaccttgggaggctcctgtgctgtgctcccagggccactgcctggacttccccagcagagagctctccactcactctttttttttttttttgagacggagtctcgctctgtcaccaggatggaatgcagtggcatgatctcggctcactgcaacctctgcctcccaggttcaaccgattcttctgcctcagctttctgagtagctgggactacaggtgcctaccaccacgcccaactaatttttgtatttttagtaaagatggggttttgccatgttggccaggatggtctcgatctcttgacctcgtgatctgcccaccttggcctcccaaagtgctgggattacaagcgtgggccaccgtgcccagcctctccacccactctgtctgttacatcatccggtcccgttagtgtaccttagagcaggtccttgttcactgctttatcctggtgcctagcactcagtaggcactcaatagctgctagctgaatgaacgagtagcaaacatagtgacagagagccttctagaaggtctggcatgcagggctaaacaactcccaacttccaggatccaccaggatccattcccgcgtgtccagctcttctgactctcggctcaatcctgtcctacaaagaacactcttcactttgggaggctgaggagggcagatcacttgaagtcaggagtttgagaccagcctggccaacatggtaaaaccctgtctgtattgaaaatacaaaaattagccaggagtgatggaacgcgcctgcaatcccggctactcgggaggctgaggcaagaatcgcttgaacccaggaggcggagcttgcagtaagctgagatcgcaccacggcactccaatctgggcaacagagggagactccgtctcagaaaaacaaacactcttaaggagagataggagaggtggagattttaggagggagtggtcatgccacaaggagggcagaccgagggctgtggacctgaattccagcttcccgaatatcaggctgtggccctcaggcacatgattctcccctctcagtccatctcaggaaaacctgagatcaggaatgatgactactggccttatctgccttgcagggcaggttcctagaagttatgatgtcattataattagtctggctgcctaaccgggccaattcccagtctttcctcactgtgtgaagttccggctccttgcccaagctgggtacaatgtcccgtacaacggggaaacctgatacacacgatgatatccggtgatgcagctacacacctcagggacaactctgacttctcaggagccaagtcacagcctgacatcaccctgggggagcagggctacagagcacacacaggtcttgctgagacaaagacaggcaggaataaaaaaaaatcagccataggtggcccaatttctataagccgatccagggcactacctctctgagttacataaaatacaacatgccagaaaccaaccacttggaaaagaggcacggtgtccagcatcagcatgaaatggattccggctgagacaacaagcgcccaacttccacttaagaatacgggataaagctgtctccggctaaagccatggctattcttgccccaagccaggaaataccctggcttggcatcttgaacagaatttggactgtgcccaaagcatcctccttatgcagccctgagtcctgtgtgccactttcgcttccgttcccagaccatcacaacttctggctgttttaatttctaagactttgctggattttgccaagatcgaactccttggatcgcgtctggcttctgatcccagaggtcccctgacagaaatctcttgtcaagaagtgaaaacctagccaagtgcagtggctgacgcctgtaataccagcactttgggaggctgaggcggacggatcacttgaggtcaggagtttgagaccagcctggcaacatggtgaaaccctgtctctattaaaaatacaaaaaaattagccaggtgtggtagtgcacgtctgtagtcccaactacttgagaggctgaggcaggagaactgcttgaacctgggaggcggaggttgcagtgagctgagattgtgtcactggacttcaggctgggcaagagtaaaactccgtctcaaaaaaaaaaaaaaaaaagtgaacacctaaccgacagcgttctgatccatccatccctagtcccactggaaaggccacacatggggtgtatggccaagatgtgaccaacccatcacctaccagcaaacccaggtagggaatcaaaacggggaggaaaattggatctgaaagggacaacagtgttcctaagaccacacagcagagatcacagagggacacatactccacacaccactgctcacagggtgattctagaacttgagtagtaaaaggccactggagacctctacactgacttccctatttgacgggaagccaggcagcctgcagaccaggatcctgaccacgtcaccagttggcaacagggaggaaccccctggagctcccatctgcccagagtccctgcccggggttaccttggtgctctgcttctccttcataatgatccgggacaggaggaccacccagatgggcatggtggccttgactgcaaagagagggatgggcactcagggggctgcctgaatttcagggcccaacctgttccacctccacggcgggatgggagggcctggcagcccctcacacctcttcgccccttctctttcggtagggcttcctcctgccacggctgttgtggtctgtcctgcttacctctcagctctcttctcagctcctcttctccctgagaaccccgtgcgtgtccctcccctaccaaacccttggcagcccctctgctgacttctcagtccggcgggacgcgccccgggcggcgcactcctatccatgcgcccaaacccgaagcggcgggcccggccgccgcccccgaggccgggcgcggaacctaccggtgtgtgcataggacacgggcaccttccagatgctgacgtgcgctgacacggacgcgaagtacttgccgaaggcgagcggtagcacgtagcgcgggtagaagcgcggcggcagcagcgggccggacgacggatgcggactgggtccggggcccgagacgggcggcgcggggggcacgcgccaggcgcgcagcagcggcgggagcccagcgcacagagccaggatgtggcacagcgacacggtcaccgggaacgggaaggcgctcaggatcaccttgttgaccacgttgccgcccgcgctcagcgcgtaccacagcaggcacagcgccgccacccgcgcgccctcgcgcgccccaccactgctgctcgctgcgcccgggccccccgcgccgtggcccgcgcccaccgcggccgccgccatcctgcccgagcggccgccccttccagcccgtccgacggcccgacgccgggcgggggcggggctgggcgggggggcaggcgccccggtctacgccgtttcccattggtcgctgcctcctcgcgtcatccctccgcgccggccgacgcgccagccaccacgtctcgagtgcaggcccagtccactgtagatgcgcttccggcggagccgaggccggaagcggaagaaggggacacagacctgcgtccaagctgtgccacctgagacgtgggcggtcccagtgaccgggagccggagctcgaacgggacgggcgaacagaagcgcggagggcttcgcagcgtcggcgtctgtgcgtgggccaaacatcagggcctcgaccagggatacaagggcaaccgctaactagattcctgattcctgatggctggcggcggctgacaccaaaggtaaaaggccttttagggaaagaaaccatttgtgaaaagctcttgggctaaactcgctctgcaaactgggggcgcacgctcgtggccaaactctggcagtgggactatcccggagcacccgatccctggaatcatgttctggaaaccaccgcgacgtgcgcagttctcgggcgtggccctggtatcatcccactgaatcctaggaacgcggtgcggtaggtatcactgtccgcatttcacagaccgaagtccagaatggggaagcgacttgtcttaggcttcctggccacactggggaccgtggtcatggtagcgtccttggacacctgtctccaaggctctgcagaagggggaggtgccgggccctgacggctgatgtccaaggaccagccgggatggaccagccccaggaggccccagtggaggaaaacaggacgaggttttcagtaagatgatcttatactaattcaagggctataatttgttctccacatcgtgtgcctccaactttttcggggaaagggtgttaaaattccgttacagtgtttttacttgtcaaattagaagcagcaaccggctgggtgcagtgagtcaagcttggaatcccagcactttgggaggccaaggtgggcggattgcttgagctcaggagttggagatcgtggcatcgataacatggcagaacctcatctttgcaaaaaatacaaaaattagccaggcgtggtggcgcacgcctgtggtacccactactagggagactgaggtgggtggatcggcttgagcccaggtcaaggttccagtgagctatgatggcgccactgcactgcagcctgggtgacagagcgagacccagtctcaaagaaaagtagaaagcagcaacccaacttggctccccaaatgttggaaggtatcttagcttatccttgcattctcaaaggccctaggcccttctggatacatggacacaggcatggtagtccctgcaggcaggggtagtggggagctgcaacctatcccaaaactctagagatgctgataggaggccaagctctgcaccctaatatcctccagctgtaccctctgtggatcagagtaaagtcacatccttgggacaccatgtctcagcagagctgttaaacataggcacagtgaaattaggaaagtataactataggcaccctacagcacagctgagtgtcagatacttccactgacacactgacatgctttgtgttttagttctcacaactctggggtattctcaccccccaaatggggacatgtgcacaggagtgaagagatgagctcagagccacacagctggtgggtggtaggcctgggttcaacctcatcctgccttcaaagccactttgcccatggccttttgttggggaggggagtgtgttctgcaccaagcttttgccaggaatccctgctagctctcaaactggctctggactgactgtagtcttacaggctggaaggaacctttggtttgccctgtgagactgcatgtcttaaggtgtagctgtttcttcatttgtgaaattaagcagatatgggtaagatgacctattccaaagtgaaaaactggaaaaccaaagtcttagcctacagtttcagggacgagggggaactaaaagatgagcactttatagtcaagggagaaaaatttttttggagtcagcaccaaccagctaataaggcagctgggggccagggccatggggtggcctttcagacacacacacacagctctgagcctctgggccataccttgtaagaactaggtattttgttgaggtgggggtagtcactgagacctgtgctatgggagcctcctacagagggctgctctctaggccaggtaaagtctgggtgagacaagaaaacattccttaatgtggccctgaatgaataaaatgtggaggtcctcccaaatgcagcagcaggctaacaggtggactgcaaggctgtgccctgccctgtctccctgcattgcagctgttggggtctgggtgttcctggctaataatccacaatccaggaaagggctgatttggttgtgaaggtccaaatgagaaaagattctcagactggtttgtgcaaatggttttttttttttttttatttccacatttatatcacaaggtgtccacttactggaccaaatagcaaagttgctcccttctgcgtcctgagaacacagaagtctaggtactgtacattcactaaggctccttgtttttgcaaatcgcgtttatgacaaataaccataaggcaaacgaatctaaaggaatggttatgagtgtttccagcgtacagacaggtcttccccctcgccccacagtacagcataaaaccagtagcacccacaataacttttgtgttgttttggggggactctagaaaggtgaagttttctagatgtgtacaggaagggaaaaaagaaaagggaggaagaaaggaaaggtttttttgtctggtggtctgatggaagaggaattgtttaaaataaacatgagaaaacttaaatttttgcagcatttctttaaaaactgggttataactgaaaccagatataaacaggtggctgcccatggagtgtgggtcacactggctggccagctggcccgcctgcccaatgccagtggctcaccacagctgagaagcttctggcacatgacagacaacactggcctgacagtggctgggtagggagcaaacagaggcagtggcatggcccactgtctcaagacactcagggccaaattaaagaacagaaaatgcaagagagatgagatgcgtgcttctgttgctgtgttaaaggtgacctctcccacaggttttctgtgcctgcctgcaactgaggccccagctttcaggtgctggaaagtgtccgcacctctttgggggtgagggactaacgctttttatagctggtttgctatagagttctgaactcactttgccgtccttccttccacgcggtccttcttcgcaattttgttagtaaactggtagcagcatttcacaaaaagagttttgagggaagagcgcagagagaccgcgtgactcccgccccctccctcccgcctgggccggactccccgagttcccagcgcaggaggcagctgggccccggccacctgcccacctgcctgcccgcccacccggcttctgcaagatgggaatgcactttgtggctgacaggccggtcagtccaagcagacataaggcagaatgttcaagcgcccgtcgtcgccgtgcggatcgagcgatatgcactgcgtccagtcataccagttaccctgtgtgtcctgacacccgttcacccccggccactggctggcctggattctgtcgagatcgtcctgtgtgacctcccgggtcagaccagggaggtccgtgggcgggctttgaggcaccagcacatgcagctgcctggccccttgccgggtgctctcctcctgcttcaggtactcagacatgaagtggtgagcccctggggtctgcgcgcccgatgatgagagcaggctgctctgccggctcaggtaggactggatgatctcgttgcgtgacagctccttccagttcgtctgttcgaaggggctctggaggctggccttggcctcctgcttgtccagctctgtcctggactgctgctccatgtgcacagggctgtctgcccgcactggctctttctgggtcagaggtttgatctgtctcgtcatggggtcaaaggtgagcttccgctcttttaaccggacaggcttgacgcccgcctcagccacctgcccgtccaagttaaccgtatagtctcgaggtcggtacctcttcttctttttactgtccgagccccctgaggaggcagcatcactgtccgccttggaggagtctggggaaaagcctgcccgggacaggaggggctcggctggggacagccctgccttgcagcccggccccgccagccgctggtggctctcaggctgctcaagccagcacactgggctttccgcactgggcagcagctcgagccgccgtacggggggtgtggacggctgtgccagtggaagcggtgacggcacctgtgtggcatcgagtgcctggggccgcggtgaggggctgggcacggagcccttgggtgcatacaagctctgctgccgggcaaaggagccctcatgccgtgagttccgaggactgaaagagcagcgagggggtcccttgggatggggaggccccggagtctcgtccaccctgtccagctgctgcagcaccgaagcctttggctgcaagcagggtccagggggcttgcccaggcccggggagctggtgtgcggtcgcacggcgttgacggggatcttgccactgtgcttgtcattctcgtcacgctccaggcggctgccctctgggcctgcatgcccactgccatccagggagctggcgaagctctctggactcccactgatcccgttggtggggaggggggatgagttggggaccagggggtcgtggctagctttggagaccttgggtggcggccctgggtggccgaggtcacgctggtcaccccggcgcttgcggctgcccagcctgtccagccgctgcccgggcagcctctggaggtcattgcggctcttcaggtcatggatgctcctgggtgggccagccgcccccacctccggccggcagttgtgtgcgcccccgttggcagagccggtggcccccgccagcccccgcagcgccgcctcatgctggtgtgccggctcgatgagcttctgccagctccgcagcagcttcttggcccgcttggcgagctcctcgttcttggttttcttgcggacgtcgttgatgagcttcccaagtcgtgtttcctacaaccagagggagatgatgacatactttcgggacaggaacttctccatgagctgagccagaaatggtgggaagtggccctgacagtgaaatgacccggttcccactgagccctaaactgccagcttccctgacacaaaacttctggggatttccggtcctttgtgacaatataaattctcaaacctagttcccagaccttcagggtcccaggtggcttctcagcagtgctgtcacccaggctcctggtgtcagggggctgtggaccatcaaggccactgtaaggacactgccagagaggcttcctgggtgagagggtgctgtggccgaggcgacagcacagagggtccgcttcaagtggagggttggggatggtgcctctcactggagcctcctccaagcacacctctcctgatgtccccacgtgcccacgaagtgtgctgggcatgtaggatgggagtaacaccacttggtctctgcagtgcccgtgggagagcaagatcgcgaggcacgagctgtgagggcacaccgcctctcttggtcctccgaagcaaagacactgatgctcccagaagctgcggaaggacctggttggtaccatcccctgccccccgttctgccctcccaaatgctggggtctgggatactcacctcaagtgcctctttggtaatagggtatttctccaggctggagatgacttccagcaccgccaccatgttccggatctgtggaaataaaaagccatttgtcaggtccctgtccttctccactgggaggctggaacaccctgccccagcctgctccagtctctccccaaccccagagcaagaggagccagcagcactgaagcccccactccatgtcgtctcctacctgctccctgggccaacctggcacccagtgctcatcctcacctgccgtctgacctcctccagtgtgtggtgtgcgggctgccccaagccctccagtgtacatggtacatacccacccacctgctgaaacccaggatgcctgtggaacaagagctgctcctgatacttaagatgacctctactctgccatctgatgggagtgggagaggagacacggaagaattcatcgaataaaatccacaaagcttaaaagatcaatacacaggccaggcgcggtggctgacacctgtaatcccagcactttgggaggctgacgaaggcggatcagaaggtcaggagtttgagaccagcctggccaacacagtgaaaccccatctctattaaaaatacaaaaattagttgggtgtgctggcatgcgcctgtagttccagctacttgggaggctgaggcacgagaaccacttgaacccgggaggcggagggtgtagtgagctgagaccacaccactgcactccagcctgggtgacagagcaagactccgtgtaaaaaataataataataataataatgataaaccagtcaatctgaatccaaagacaccataaagagagcagaaagtcacaaagtgggagaaggcataggccacaggcccccaaggagctgtatctggaacacagaatgcctgtacagcagtacagctgaccaggagcccggcgtagactggccacaagacaggaacaggcacacggcaatgaaatgtcagtgctgatgctcagcctctcagctttatcgataatcaggaaaactcaaactgaacccacaaatggatacatgatacacgtgccccactgacaacactaggtacttcgggggatacagctgactttggggactgctgggctttgtctggcagagtgaagcatgaacacatcccatgaccaagtaatccctcccttttaggatcttgctaggagccacaccttgttctaagcacttcccacacattactgactcccttaattgttacaacaagaattcctaccactcaaccaccacctccagcaactacaggtttctggtgggctggctagcgggtgggagcccaggggccctgaggaaaccacagtgagtagattactcaactcccccccaccccaacatgataaaggagttaagcgggcacatgatacaaattaaaacagcataaaagggcacacaaggaaatgggcatctctgacccagccactgtagcatttccttgcatttttttccaaaaatatcccttgtgtatataggcgtatacatccacacttatcacatatttcaaaaccaaactgacagtggttcttgccttttctgacttaatgtcagcaatgtccagcctcaaacagagcccctcatttggctcaccatcccttccagagtggggaaggcccgacttgaatgctgtgggacacttaggcactttccgtccgccattacaaaataaggctgcaaccgacggcagtgacagacctgactctgagctagtgcacagacagccatggaggagctggggctccacatccatgcagggtggtcacctcacccccagggaggctgctctattccattcccaccaggccacatccttgccaagactgcgtggcaagagtttccgtaacacatgattgtaaacttagcatcttacacagcacacatttatcatcttaggctctagggctcagaaatcaggtctgagtctcactgggctgggatcctctctagaggatccatttcctgctccttcaggtgttagcagagttcagctcttattttgtttttttttttgagatgaagtttcactcttgtcgcccaggctggagtgcaatggcacgatctcggctcactgcaacctccgtctcctgggttcaagcaattctcctgcctcagcctcccgagtagctgagattataggcacccgccaccacgcccagctaatttttgtatttttttttagtagggacagggtttcaccatgttgaaggctggtcttgaactcctgacctcaggtgatctgccctcctcggcctcccaaagtgctgggattacaagcgtgagccactgcacccggcccagagttcagctctttacactacaggaatgaggcccattttcttgctggttgtcatccgaagccattcccagcttctggagggcactgcatccagctcacaccccctccccttatgctcaaagccagctacaggctgagtcctcacccggcatctctctgacccagccaggataggtgccatctctaaggactccctgactaggcagggcctgcccagatgatctcggatcacctccccatctccaggctgttcccttagtcacatctgtcatgtacggtaccatgtgcccaggctccaggactagaatgtggacgtccttgagggctgttaattctgctggcctcatggattctggcttttctactcttctgccccacttccagtgggaggcagccactgccactccctcccttcccgtgttgtctcctctgggtgtaaagttgcagagccacgacagcagtccccgcagaactcccacaaagctgccctgccaatgggcccatttgctctttggcaacaacggccttgccttgcaatgttctccattcagggctccaaatgaccctgaaaaccctgcttcaagctgtgtcatggtgggggtggacgggtgatatgaggggagatacagtcctgtccgcactcctcgtgcaatgggcagggatcagtgcaggggaagactgtgcgatgaggaggccagtcccagacagacagcaaggccaaccactccctgccccaggcactccagcaccgactcagtccctgggcttgccacatggcttcacctccaccctgctgacctcaccctggtatatttggagccctggttccccacatactcctgaagcagcagtccttgcagagcagaacactgcccagacccagctagcctggtggcacaaagtgtccttgtccttgggcagacaccatcctgctgccagacaagagggaggagacagaacacctgggcaaccccagggtctggtactgagctggtgccccagaaatcaccgctgaactaacagccagtcccaagagtctcctggaaactgtgtgggagctggggacaccaggcgaaggtgtgagggccctgtgactgtgtatccttacccttggcccctcccctgccttatgagccacgcttaagcgtgtgcagagaggccttcagcctctaggagccccaagggaaatgctacagccttggcagtcccctttctgtccccaccgtgtgagctgctcacctgaggagtagaggagcccgcctgctctacctgtaaggtgctagaaacccacagtcctacgccgtaaacagatgaactctgccaacacctgaaggggcagaaaatggatcctccagagaggagcgcagctcgctgcttcctggatcccagcccggtgagactggagctgacttctgagccctagagcctgagatgataaatgtgtgttgtgtaagacacagagagagggtgagtgtccagtgcggccactccctggagccagcagaaggcagtcagtgatgtcagcagagctaaggatgggggcaaggtgagactgccctgccctgcgacctctggggcattgatgtcaagcagtctgaacactgtgtggggagcaccacctgggcatccagacacaggcctcccaggcccaggaggcagacactgagcaatgcagcgaggaatccctgcaaagggcctggccccgaccccaggcacactgagccagaaggctccacagagcctctttatagatggccacagtctgtcccaaagaacacttagcacccaattggtgctggtcccataggagcaaaataggagctggcttctgaccctggccctggggaccctgccttaacaaccaactgaccccccacccaggagtggcaggtctcccactctcatggaggtggccctctgtgagtgacagagacaccaggactcgtatgtggctgaggggaggctcccgctctgactccaggcctgctaagtccagcatgaaccctcagggcagggaggcaggccacagggggagggcagcacctaaggtggcctcccagggaggtcaaaaaaggatgtggcagaacgagctgtgtccacctgggctggagaccgacttccatgctggaaagcagaaaagagctggagaaggatgggcagggagctggccagacagcaccaaagccctgcggcaggggagaggccatgggtaaggacaccgggaggaaaaacagacccaaaagacccaaggtggctccttcacaacctgtcttctatcccccttagcgactgcccccacagaccacctgcccttgccctgtttctgggatgcccttggcacctgtccatctatctggggaagtacactagatcctaatctcagcacagacacagtttgactccacatggggagccgctccaggcgatggcctcaaaagatggctttaaggcagctcttcaggcttgccagggccatgtctgtggcccgatggccaattgcagcctcttgctgtcaggaatagcctggcacatctgaggccccctcctcctttggattctcccttgggatttgttcccagtccaaaaaaacctctcaaaacacctgccaagttgctttcccaaaggggcaggaatcccgtcaggaactgtagcctctcacttctccactagggacccctcaatagatgcagatgggtctgaacttccttaaccatcaacgaagacaggcgttgcctcccctttctaccaacactgaccgcccctgcccacttaatttgcttcagtttggcctcttcattgctgcgggaagtgcctgtgaagggcaagggtgttgggtgggggtggggggtgtcgacagcagaacctccatgcagctactaggagaagcaggggtaaatgcagcaaggagcactctggaagcaggtgggacctccctggggtgcctgctccaaaggcaggcagggcaggaagttagcaggtgggaccaggtgtggcacaggtatacatgcaggtccagcccagccgcctggtacatgaatgttgatggaactgactccactgtcacaccgaacactttcaggtcttagaatggaaatccatgaggcatgatcaggtacacatgggccaataggaatgtgaacattaatctcgtccttctggaatctcagaaaaaccaagcagggaggcctggtctcaggtcataggcatcacagctagcatagatactgaggaagaacagtttgcatccaggcagagggtgaactggggccaccagcacaaccctcagcacacaggtgccccacacttcagggatgccccaggaacacacgcatgggggcatggaggggacaacttctcgcccaagaccacaagaggtctggctgtcccagggctcttttgtggtcatccttccacatgagaacttaaaaaggcttccacgggcgcggtggtgtgcacctgtaatcccagctactcgggaggctgaggcaggagaatcgctcaaacctgggaggcggaggttgcaatgagctgagatcacgccactgcactccagcctcggtgacagagcaagactccgtctcaaaaaaaagaaaaagaaaaaaaaaaccgaaacccaaacactgcccccccccgccccgccaaaaaaaaacaaaaaacaaaacaaaaaaaagaaaggcttccggaaaggctggcacctttgtccccagagagccccatagcctgtgctaagccacaattccagccagcctaactggtgacatgtgctgttcagctcacaggaaatgtgaggaaggaggcggggctggacacgcacagagacagcctgagggaggggccagcacccctcagaagcagcctgggtcaggcgcctggagctgcgtgagacacctcattctcccacaccctgggagcagtggggaaccctgtatgcgacttcacagcacaccacgctccgtgtgagctattaaagacccaccacgcatcctcgtctttcagtgacactttcctgaagaaataatacaatctggaatttgctacagaatcatcccctagggtgagtgacaggagggggatgggtgaaacaaagtcacatggctgtaagcagctatctactgaagcaggatggttacctttctctacttttatgcttgaaatttctcacaaataaagatgagaaaatacatctatttcctagcatttgtttgggagagttcactgatctagaaggactggcagccatctaaaggggaagtgagcaaatagctgtttccaactcctcatagtggcttcactgtccaccatctggcccctgagtggggcagcaagggccgagggctgggtaggatgccacctccctccacgtgagcctgtctcaagtctcaggcctcctaactgatttgaactgcacaacaccatctatctggtgagaccccaggagcccctcaccaagctcccctactctggtactgggctgctgcttaacagacctggtgcagaaacagcaggcacccctggggctggagaggggagctctgagtacccatgccagctgtccatcccggtccgactctcaggtgtcctcacgcctctcttctaaaggaaaccacagagagcccgaaccaggggcacacgctaggtcgacagttccttcctgcagggagaggcctgacctgtaccaggaaggagcccaggacagccaccaccacagagaggacaggccctcaagtggcccagaccaggagggaggacttggcaagaaggggtgggggctaggtcactctcttccagaaggggagaaacataacaatgagccagcagtaacccagggaagggacagccgtcactccaggacctgcccagccccagtcagcaccacctccctcccatctgcgatccacatcctatggctctgggcacagctgagccacaggacacagccactcagaactttctttccaggtttccctcaaaggccagccagcagcactcctctgtggccctgtgaaacccagtgacacctctgacccctccggagtccggaagactagactcttctgaaaacccacctacgacagggtgcgtggaatcacctttcaaaccaaactcctgtcggcaaatattttaattgggccacggcatgtgtccgagtttttcttctgtgaagaggatcactgggtctgagtgcaaagctggggcctgttcagtggagtggacccgctactggccaacctcttcctcgctttattacaggggtgtgtaagtaaaaccctcaggccctgagtaattactgctggggatttccagccctggtctgaaacaaggaactgagactgagttttgagtcccagcagccccttggcttgcctctccattttctccacatctgaactgttcccaccccgcctgagatccccagcctcttgggaatgcagctgtggtagcaaaggggaaaccctgtgctgcccaaggtctgaccaaccaatagtcccaagggtgctgagcctgggcaggcccaaccgggcacaactcgcacaggaccatcactggtgggttgcccttgtgccaagttctttcacgtcatcctcacaagcgcactctacagataaggtaactgagggccaggaaggtaatggaggtcccgggtagaccacacagctagaagatggtgaggcctggccttccactagcctgacatggctaccaaacacacagggcccatctggtgctttgagtaggtggggtgaagggtaccaggtgccaccagcctgtggtgatgtcggcactctgtaaagactctcctgacgtgctcctgcagtgaaatgcacaggttacaaacagttccttgaacccacacagggccacctccacggtctccgtgttgtctatgccttgtccccaggatgcctgagaggcaggaccagggtgacccaggcatgcacgggccaccacagcagggcttcagatggcactggagcccactccccaccgggctggccctgggaacagtgcacatggagcacagactgcagttctgcactcccccacctcggtgtccggccagccttcctgaccaccctggacggtgggcggcactgccctggcagcctgtgggcccgcacctgtgccccacagcccacataacctgctccttgggctcaaaacagcccctgctgaggcctcagtggcaaagcacctgtaaaaaccggttcactttaaaaacaacaatggggatgttgtcgggttttttttttttttttaatgcagaatggtctagacagtaatttacaaaaactacttagctcaaaagactgtggaagtgttcatcagcaagcaagctgtccttccaaacccaaacatgccacagatggcacccagaaacagacagtctgccttcaatgtgctaagcattctaatgccgtccgcggctgagtcacctcgcccaccccccaacccccaacacacagtcgtgtctgctgaggacacacgggtgaatcaaacagggctttgctgggagagtgtgtgtctgtgatttggttcccgccacaccaagtcttcctgcttctgacaaactccgcacgtgttcccaggcagctgggagccaaactgcctctggtgcaagtcagtacaagaggcggcacctgcatccccaccccacctccaccccaagaccccagctctgccctccctctcagctctggaaagcgcagccctgaggggtgctgctgtgcttaccctcaggcgggccccaccctgcactctccgctcagcctcatggggctggtgcaggtccaccaggctctgcccagtgaaggcaccttcctctgaggggacctcatgggagcctcaaaccccaggggcaaagcctcaagttcacagcttctcagaggaagaatgacactgggaggaacaatgacgggaaggtgcatgtctcggccacagccaccaagctcaccacttgaaaagcacttcctgctggggccctcctgctactcccaggagcagccggccacctgagtggtctgtcatgtccatgtggccctccctgtcctgcagccacagctcctgtaatgcttgggcaagtatgcaattgcatgctacaactcagcccgggggacgggaaatgccacctgagtacaggcagcacgcggagccctgactgaaccccatgagcaactcagaaagaggaagcccagggcttggggcagaagtaggagctccatcagtaggcatgcctgacttctgcagcgagggaaacttgcagatgaagccaggaggcaggcagcgctgctctccacagccactgcccccacagcgtccttccctcccactttctgtttttagcagctcttcccaaccaaactaccaacctagactctcctgacctctgcttcaggtctgcagaacttacgattcttactgccatttggccctttgtgaaggcacaagagctctcaaagctcatctgtaaattgactcgttgctacgcggatagaactggagcagtgggaagccaagcggagtcctggtgatagcacgctgggtgggggcttctccctctcagcctctctcttctaggagcagctgataagaatgccagctgcagaagactggaaatgacccaacatcctcgggggaaacacacacacagtgctcggcccatatatgttccgccaaagacagagcccaaataagaacgagccagcttttcaggaatcaacagggaacaaccttcaagagactgccaagcacagagatgcacacaacagcgcaccctgtgccgccgcctggaagatcctagctgaggctgggcagacaaggacctgatggttgagccgcgcatagctgtagcaggggaccgcacctggcctccagcactgacgcaagcaagacctatcactgactggagcccagttcctcctctgagagcatgagaaaaccacaagatggtgtctgtagagcatgaatggtgtgctggagaccacgcccccaggggccaggccacgaggacccgcacactgcactttctgctgggctgctctgtggtctgtaagatccattcaggcagggcagtgcccagcacggtgcctggaggcagcctcagaggcccattgagagaggaagccgaaggagagcagccccccgcctgcctgtccaattgggctgctgtaagatcctgagaactagtgaccttctagaattccccgagacaagtcatcaaatgctctctgagcaccgactgcacacaggtgctctaccaaactctgggcccgctggatgctgggagggggcgttaggatccctgtgtactgacccggaggagtagacagagacagccaaggtcaagaacagaagcaacagataaaatgccaccactgaggctctcacccaggctgccaggaaaccccaggggaggactacacttggctcaggtccagggccaccccttcccccacagctcctgggctctgtgtggagctggagggacaggagtgggcacaggggccttctcattgggcattcctgcaacgagggccacggtgcagagaaccaaggacactgtcacccaagaaagagtctggtgactctgtggatcccatggtaaccaccatttaaggatggacactcacgctatgatccagcaattccactccaagcagcacctacagaaatgcactcagagcagctgtatcagaacagccccaactgaaaacagcccacgcagccaccaacagaacaccgaataaataaatcatggtctgtccattcaatgttggatgaacaaactgctgctacacataacctcaaagacaaatctcaaaacaacgttgagtcaaagagccaaacacaaaaaaacacattttttttttgtcctggattaaaaggtcaaaagcaggcaagacttctagatggtgagagcagtcagggtagtggcaggcagagaatgactaggagaggacgttgaagatggcttcaggggaaaggctctgttccttaacctgggtggactggggttctcagatgtgttcataaatgttcattcagctgtaaaacttgggacttgtacacttttctagatgtatattttctagactatatttacaaaggttgttaaaaataacctactgtgtgtgaattccatgatcttagaggccacctcatcctacagaaacagatggtgaagctgtcagggttgtggaggagggggaggtgttggcaaagcagcccctcgttccccacggcccagaccctctgagagccccacagaacaaggtctgaaaacagcttcaacacaagccctggccacctctacaacacacagtgatgcaatgtgcactgcacttcactgctcactgagaaacgtgtctgcactctcctgccctggatgggactgaggaggacaagggcactctgaagcttccccggcaggagtactcaacagatgagtgtccccaggaagaagtgagcactaatgctactggaaagaggcaggcaggcagcacccactgggcatggtgccagcaccctgcagggcactggggtcttgccacaccatggtctcccctgagaccacagatacgccccctccacccccaacaggtattaagccactttcccatccaagaagccagggtgccagctggccacagattcgttactaacctaacctgctaccccatgcagccagcacacacctgcctccctgctccactgtgacacaggacactttaggatgaggcaaatctgcacatctatacagcggaaaaggacagtgaagaaatgcctcttctactcctagtttgctgagaggttttatcaggaatagatgtctgattttgtcacatgcttttcctgcatgtactgggatgattataaggcttttcatttctggccttgtaatatggttgattacacacattttcaaatgttatctgcctcccttgctttaatttcagctccctttctttgctaccttgattgtggtgttggtgttactgatgtacttacaagttaaaatttatcaaattatatacttctgctatgcgcagtttattgtatgtcaattatatctcaataaagctattaatgtcaggcacagcggctcacacctgtaatccaagcactttgggaggtggaggcaggtggatcacctgaggccaggagtttgagaccagcctgggcaacatggcgaaaccctgtctctactaaaaatacaaaaaaattagccaggcgtggtggcaggcacctgtaatcccagctacttgggaggctgacgcatgagaatcacttgaacccgggaggtggaggttgcagtgagctgagattgcaccactgcactccagcctgggccacagagagagactttctcaaaataaaataaaataaataaataaataaataaataaataaataaataaataaataaagctattaaaaaaacacccatggaggcagacagatgcagcaggtcctaggaaaagtaggagggatggcaggcagagagaaggactgcttctttgttagagaggggaaccagatgccacctgggtttgtcctccctggggaaggagggtgggccctttggggaggctccttctctcctcagtagaaggagaatgactgtcacgcctaggatctcagagggactgtaaggactgaaagatacacttgagaatgcacacaatgcactccccatctcagaccagactcctgcaggcatcagtaggcacctgctttttccttctgggacattctgtatgcacccacaaacacttgtgcactgcactgattaggcatcctaattgtagctttggaaaaaagctgtagctgaagctgggtcacagtgtcctatgagctgtgaaataaaatgccaagcagccaccaagccacttcccaaggctgaacttacacacacacccccttgtatgcctacctatagggtttggtcatacttcactggagacccaggtgaaggaaccaacttcctacactcgagaaaaggccagcggctgcagacatctgcaaagtcttgggcaaacgacagtctgctctccccaaaacatggtgcaagcaatgatgctggatccatcctcctgacctgaaagtagccacggtgcgtctgacagagtcttttccctcctaattccgcatggttttctcctatgggaattaagctcctagagtgagaaatctgtctgaaatcctgactttccccgctagagagctgatctagatccttcctattcaagtgtggcctaggggtcaacagcacgggcatcaccagggagctgctttgaaacgcacaatccccatccccatcccccctagacctcctgcatcagaagctgcattccaacaagccctcaaggaggcccagccccacagggatgatgggcagaggcacccaaggctgtgggctctgcttggcaccatgtgcccagctgcagccctgacccctacttctgtggccagccaatcagaggctccctggtaacactcctggcaccacctgcaccctgctttccagagtccctcccaggtgtgactcatccaatccctctgacaactgtaaaccctgagggggtgtgatgtgcccaagttccatctgcaggaggggactgcagagtccataccacgaccccacagagcccaccaggcacagctgtggggccctgtcccgtcccatgccaatctcagagaaagcctctcccgatggtggtgtgacagggtccagacaaaccacaacaggatgaaaggacaggaaatatccaggctggtgggggacgtaccgccaccaaccagcaatggccactgtcagggacaatggcatctggcagaggctggggagctcccagaggatgttagcaaatcacgccacacatgtcccttccaaacaaagttcagcagcagcaggtctcacccgctcgcctaggcatgacatgtggagcctgtcaccagcttcataaccagtgtccccaccttcatccacttggctcccagagctcctggtcaaaacggcacccccttcttctaaacctcaaagccggtgtttctaagataattccacttcagctccaataaggacctgagtagcttctgcgggctggaccgatgaccagttattgcaactggggacattttctaagggcagatgatggctgtcttggttccaatcaactgccttacaaaccactgccctggaatgcaactgttccaaaggcggcatcactcaaccctctgttttaaaaacacaagtcaacgaaaataacaagttgcaccaccacccccaactcacagccaaacctcccacaggactggccgaattctgccctgcttggctggcgccgactctgtaggtgggccaagcaggcaactgatgcccaccaatccagacaccagcacctggtccccaggagggccaccagcccacagcctgcaaggagaaaagaagaaatcctcctacggccctcagtgacatctcatagacccaacaacctgatgccgaggtgcctatccgaagtcactgcatatttcatcggcaccctctggcccaggctgtgcagaggacagggccaaatcaccacctcaccattcactgggtctggaaagcaagccctttccagcaagggagaggcagggaggcatgagggagctcctcccctggtcatctggctcacagagctcttcctcccacctgcccacacatctgctcagactttctttagccctcactgcctgcaacacacccgctttctcacatgtggtccagcctccacctgcaggtctgctcctcaggtgcagggaccttggttttgttcactgttgcctcctaagtgcctagaacagtgcctggcaactagcagggacttgatacatgccaaatgatgggtggatgaagtccctcatccacggttgctggccaccatgttcactccaatatcacaaacatctcaggggtctccctctgtggcaagtcaacacctagagagcaaacacgctttgtcccgttgtcagctgtcacctgcactggccatcccagaggatcatgagaacacagtgactcttggtggtcctcacaaagcttcatcaaagtccaggtcaagggtgccatctctgagtgggtcctggagatgctgctagacagaaggccacctctcctgtccctccaaagctgtggtcaatggtggcactggctctgctgctctctctcaggcaaacatgtttgctcagcaaggctcaacgtgttttgagagagccttcgttttcaatgcagaggtcctggaagttactatgaccacacaaattttctccagtttaccttcttggcaatcctaaagctattccaaattgttatataaggagggagaagggaagccacatgagatttttgcaaagccacgaattaaagcaatgtggaaattaaacctaacaatccactgtggttaactcagtgacaggattatccatatagtggcggcacagtgtggcaaggcagggagagtggaagcttgctggtagaagcctgtgttatctgctggctacagtgagggcacactcaagggccaccagggctcctgaggccacttgccgccgagagccaaatcaaccacttccttcctttcccactaaaggctaggcagcccctggtggctctggggaaagcccagccacacagcagtggccccagtcaagccccaagtggggtggagcggatctcaccggtacttcctgctgtggacctgaaccacgcgcatctcacaagtggggaaggggcagcgaaaccaacctgagaggccatgatttggcctgggctaaatgccagaggacaccctgcagcgagactcgtgctcccttgtcatgacatgtccaaggcaaggtggggtctgagctgggttctaggagaggcactgaagtggcctgcagaggtggcagaccactggacatggagaaggttcatttttcaccacggtgaagatgaagaagggggaaaaaaccagaactttcttcatttgctaacagcacctcttcaatattttaaaccttttttaacttaaaaaaaaaatctggtttcccccaccttcatcttcaccacacaagtgctgacagtcaaccacagccacagaaaatgcaacagtgcaattaagggcaggaacgcatgtttttactacaccctaaggcagcattaaaaagtgctggctctggaccctacctgtcaccacaccaaaacggctctacccagggaacctgtcaccaaagccagggacccatcagcctgcctcggcctcacctctcagagcagttcctcgaatccagggctgctccttcctcctgaactctgctcctgccggtggcccctctacagtctcaacttcctccacttggggctcctcaggccccaaccccagatccttcctccctcactgcggattcacactccaggagcagtggcagcaccccccatgtaggaaagcccacagtccaggagtcacctccagtaggtgcctctgcgttggacccctgtttcaaagccctgagatggttgaccccagccctcctcaaacccaactcgtgacacgtgcgcacctctttccagctctgtgactgtctagacactctgaccacattgggcctaatgctgtgctgaccgagcacaccgagggaagcaagaagggacctggtgacttgattgtgcacgtgctctcaccctgcccctgtggtcttcctctcctctgagagcatctactgagccactgctgttgtcagatgtgcgctgtcttgaaccccagcagcctcaggaggtgagatgaacattgtcattgcacaaatggacacctggaaactcaggaagggatgacatcctgtggtggcttcaggctgagagtgcccagcagacccaagaatggagaccagtgctcaggtctgacctcagaggccaagctctgcacagaacaaagtgtggagccaactcacacccttcactcccccaacagcaatgctttcctgggtgactttcccgtcctagtccagtgccagtaacaattatatcactgcatcacagatactgcattcttttttcatttaacacttcttgttgctacataatcttcaagatcatgtctaacagctaaatgttctattaatgtatcataattcccttaaccttctccgattgctgggcagttcacttctttctaggttctcctgctgcaaccagtactggaatgaacatcttcaaacatgcttccttctctcattttttccttaggaatcaattcccaggtgttaaactttactccaagagagttcaaatactgtcatggcaactggtactgcctcaacttttttctttttgtttttcttgagacagggtctcgccctgttgcccagattggagtgcagtggcaccatcgtggctcactgcagcttcgacctcacttgagctcaagtgatcctcctgcctcagcctccccaagtgctaagattacaggcaagccactgtgcccagccatgcttcaactgtttttggctcttggcttccacagtgcaatgaccccatcacaaaagggagggagaaagcagttaaatctgctgtgccctgccaagggtcccagaaagcaaccccatgctgcgtcagagctgttatcctgccctccttatgtttcccttgactctgcacaggtatggcagtgtgtctccaaacgtgaaggccagtcaggcaagagagaggatctggcacagacattcataaataatttcctaggactggcactgaagccatactgcccacaattgctgaccacagcctcagccatcgagtgcatacgtgggacacctccttgcgtggagagatgcagacaactcggctgcacgctgccacacccagctctaactcagacaggcatgtgtcaatgccattgttgctctacctggagcaggttacattccttcaggaacatgctggcacagggtggggatgttcctgggatgctgggcaggatgcggggttgaagtggaagaggcaagagcagatctagcccctcttccacgccactcccttcgcccttcacaaaggaacggggtgacaggacctggggtaaggtcttccaagactcctccaggtgtcttgggcaaagtgaggccctggacggggttccacagcctagccacttcccatctgctggcttcccagcctgtagcccttgcacggcacactgtgccacagccccaaagttgcaaacaaatggccaagaatgaggtgggccaacttgcagcagttcatattccaacctcacaagaagaccaccactccatcacgaagtcctatatctcacagaccacgcccacatggtcagagggtgacagatgccagaggggaacagtgcccccaggttcatgagaacaccaagcctgagcccgagcatgtctaccagacagggccaagatggtggcagagcctagatccttctctaggaactctgggttcttctgggacacgggtacagtacaaaagctgtagcctgagatgacaacctcagctatcaatcccacgtccctgtgcccagcactgccagctgacaataatctcaattcagaacagcctcaaaagcaagttaagtttcccccacttcacaggcagtgcaggacccattcagggctctcctgctactgttatataccagatcccagtatgacacattctccgacattcccactttcctagtttatttcagcagcacctcttgaggcaagaagtcaacttaccactgttgtttcacaccgcacttcctaaacaggtaacatttaaggttagacaacagaaacaacacaccaagacaatcatgcctgggtgagcatcaggttaagtttgtttgcaaagtttgccatcggaaaatatgaaaggaggcacacaccaacacggtcctgagttcaccctctctctcctggttcccagcagcacacagaggtgcgtccggctctgtgggctgcttggtgcagccttcgtttaccctttgttcttgccacatcagagccagccactttctaaggctggttttttgtttgtttgtttttgagacagggtcttactctgtcacccagtatggagcgcagtggcatgtgatctcagctcaccgcaacctctgcgtcccaggctcaagccatcttcccacctcagcctcacaagcagctgggattacaggtgtgcaccaccttgcccggctaatttttttgtatttttagtagagacagggtttcatcatgttggccaggctggccttgaactcctgacctcagatgattcgctcaacttgccctcccaaagtgctgggattacaggcgcaagccattgtgcccagcctctaaggctgttttcaaattacctccctggccaggtgcagtggctcacgcctgtaatcccagcactttgggaggccaaggcaggtggatcacctgaggtcaggaattcaagagcagcctggccaagatggtgaaaccctgtgtctactaaaaataaaaaaaaattagccgggcgaggtggtgcacatctgtaattccagctactcgggaagctgacgcaggagaatggcttgaatccgggaggcgcaggctgcagtgagctgagatcacgccattgcactccagcctgggcgacagagtaagattccatctcaaaaaaaaaaaaaaaaaaaaaaaattacctccctggagcttccagagcccaggctcaccccacccccagaaggtcggaacacaagactgccccttgactcaggtcccacttgggttctggcgacatgatggtgatgccctggcctgcctcccagatgcaccccatcattctccttaacccagcagcacttgctggtggcatgaactgccccacttggcatccagtactgttccctcccagcaacacagcaaaaaaatccactgcttttgctacagttgagaagtcgcgtcaacaactgctgttcccctgcacaccctctgacaagttccaccaccagcactgacagttccagtcctgccaccccagaggtccacagaccctgggccactgaagacctcacttctgacactggcgcatcaggcctactgtgccggacccatcatctgtaataacctttaggacaaactgtaagggagaaaatgtgctatgatgacatcaaataataatgagttcactggctgctgaaaaccaggagaatgttgctgaaaaatttaatggctacaataaataaaacaaaagtaataaaaaaaacacagtacacatactggggaaacaactgaaatcaagtaccaagtcccaccagtcaaacttcttgagcttccctgcccctccccgcttggggacacatgtcctccactggacagctcctggagggcctcatgtgtcctggcgctggtgcagtaggaagcctgggggaagagactgctgtcaggcagggctccagatgccatcgaatcattttgattgccctttccattttttttctacttcactcttgtcttaaacaattaatacctggacttgggtgatatttcgtgggttatacttttccctagtacccatgaaaataaatgcatagctatcaaaataaaacatgctcacctacaagcccataaagtcctttttcacggcaggaaacatggatcctctaacccataggctttgctttatttatcagcagccccttcaaatcacagataagctgcagactctggccatcctaaacaaatgtcacgcctctcacaaacacagagtaaatgtgatgtgtggtgtctccagacctgcaggtagcagatgtgcaggacccaggaacagctgcagggaagagcccatccaagctcccttaaatactagcttttgtcacccagaatcccatattaaaagggggtgatatttggtgggagaggccagggaagaagccctaaggctctgatgcattccggccctctgactcctgatcaccctcactgttgcgccccctccctccaggagcagcccaggcttaacggattccctcaggaaccccagttccagcccctgccaaaccgctcccctaccctgctggcctggggctggaactggggttcctctgtagcaccctgcagcgcagctgggcaagccacttctctgtgcaccacaggacacacctgtacaggggactgtgccattgagcccacaggtgctctgaggacaggagagaggctatgtgcaaagcatctgccctggggcctgacgtagaggtctcaccaccaaagggcactaaccacttgccacagaagcctcaaaagttagacctagatggatgcaaattctaccctctgccctcttggtgcctgagatggggtgaggacacactctccaagcacccacctgtgagaggggggacaggcagtcaacaggcagccagcccaggcccaggcccaggcccaccaggagcccaggagcacctccctggctgtggtgcaccctccctaggtcccccctcatccccccgggccctcctgccacaggtccctgcagcagccccctcctgctccgcacagccttgcatgggctctacttccacctcctcttggcacagccctggaattgtgccaggctgaggaaaggagagcagataccaccccctctagtgatgcattaacactgatcaatgactgggacccctggccctgaagctggatctggcctcaaaatccacttttacctggagcttcactgatcgttggggtgcaggggggcctgccctctccttttcaggtatgcccagcaatccccctatccaactgcacatctgctaatactgccagaatttgacaaccctgcctctccccacagaccccagaggccctgtgaggaagcctcaacctcactttctaagcccctatcagctccctgggttctcagcctcctgccagtggcctccaagactgccttgaactgcaccacccccactgaccccaagtgtaagatgaggcctctgggattctcctccccaacctgctcctcccaaagagaatcccacaggccctcctgcttgctgtaggagctctgctgaagatggactaggaagagctggttcttcacagcctcagtgaggccgatcaggcactattttatttattaagaaattcttggccgggagcagtggctgacacctgtaatcccaacactttgggaggccaggcgggtggatcacttggggccaggagttcaaggccagcctggcccacatggcaaaaccctgcctctacaaaaaacacaaaaattagccaggtgtggtggcgcacgcctgtagacacagctactggggaggctgaggcacgaaaattgaacccaggaggttgaggcagcagtgagctgagactgtgctactgcactccagcccttttacaagcagctaaggcacagagaggtcagctaatctacctgaggtcacacagctgggtctggggcccaggcagcctggttacaaacactgactttttttttttttttgagacagagtttcactcgtttcccaggctggaatgcaatggcatgaactcggctcaccacaacctctgcttcctggattcaagcgattctcctgcctcagcctcccgagtagctgggattacaggcatgcgccaccacgcccagctaattttgtatttttagtagagacagggtttctccatgttggtcaggctggtctcaaactcccaacctcacgttatctgtccacctcggcctcccaaagtgttgggattacaggtgtgtgccaccgcgcccggcctaagtactggctcttttaccacactctcagctgccactcacagcaacacacagataaagcacgcctgtggccttgaaggtgctcctggcctggcaggcgagcagacatgtgatgagagagcttctaagtgtgtagcaggcagggctgtgacactcaggatgctctggggcccctaggagggtgacagagggagtctgcgaggacacctggagagtaagcaggagtcctctggacaagctggggaggcaaggacccgggagcagcacaagtaaagggctgggcacacagcagcgcagcatgcgcagagtgccagacaaggtggggacacctcccggcaggccaccccgggccatgctcagctcagggagtgacagggtcagactgtcgttttaaatagctcattctgctatgcagaagcaaacacacagctgaagcagggagacagttctgtgggcgctggccagcctcagggagcgacatggtgaggggcaggaagggacgtggctgtgggaagcagcggggctgagagagggaggactcaaggcaggccgggaagcccaccactcggctgtgtgcctgcaggggtgtcaggggatggatggcgggatacctgtagccagacaccagggagccgccgtcagcctgtcctactgacgtgcacctgctggttcattcattccctatggaaagttctgagcacagacttttggcagatcacgctgtacccattctgggacaccagtacatcactgaccatgagggaaaaaatggtgccgactggaacacacagcttctcctcaaagacacagaaatgcgactgaaatgggcatttcattccttctcacagcaaccctgagcacttggaggtaggtccaggtggaaggtcttcctcacaccctgcacacagcctggaaccataagccatccccactaccctctcccctcaactgtcatgaatgggaccctgaatgccacacccctaccacctttctaaacttaactcagaaacaaccgctacaggcaattccacttctgggtatgtacccaaaagaaccgaaagcagggacgtggacagacatttacacacccatgtccacagcagcattatttgccatggctaaaacatggtggatacaactcaagtgttcaggaacagatgaatgaataagccaagtgtgatatatctgaacaacaggacagtatttcagccttaaaaaggaagggaatcctgacacatgcaacaacacagatgaagactgaagacattatgctgagggaaagaagccagtcgcatgaacactgcacaattccactcatactcagtagacaaaatcagagaggtggaaagtcgaacagtacgtgcgcccagggctcgggaaggggagggacgtgagtgttgaatgggaacagagctcggttttgcaagatgaagagtcctggagacagatggtgatcatgaccacacaaccatgtgagtgtgtaagaccactgaactgtacagttaaaaacagctaagatggttaagttttatgggatgtatattttacaattaaaacaaaaacaaaaacaaaaacaccagcgggaccctggcagagcccctgctgcctaagttcctaagaggtcctcctgccaggaccactctccctcaggcatcttttaggtggctcctgggccctctgctcctcctgcacaggccactgaggcaaacgggagtctcatgtgcaaataaatggacagggcagccaaagaagagaggggctgggcttggaactgagaccaggaaaacctcctgaggctgtggagcaagttgtatttccaagataagcatgaacatcgctcccttgtgggactgtgggagggatcagatggccatgtgggagaacttgcaaggcccatagtcaagtgccagccagctggaggtgggtctcgatctgtgcaatgggaagcatggaaaccatcacctctagggccactgttaagccatgagtgctcatgagtgcttgagggctttttttaaaaaaaaaattcttcccttcttttcttcttaacttcccacactatgctgatgtatcaagggcctttctgaatgctaataccacatctgcaggagctatgggaagatcctggggaagggacctcagcccctgagccgcagtctccccatcggtcaatagcagggccccaacactgcctatctcggtatgtgggggccagatgtaaacaggtactctcccccaggctcactctggcaggcctcttggagcccacacacccaacctcggctgttcaagtaaagcagtgggggaccaggggagctagggcattagggaagggtctctggctccgtaaggctccaggcagtggtgagaggaccccgaggttggaatgcacatcctgtgagtacaggctctgggcagagccatggaagaggtacccatggaaaggtgcctctgcctgcaaggggcacccacagaagactcccctccattatctgccactgtgaaaactaccacccagcactttcactgcctggcagacctaagcacaagtagaggctcccctgggtgcacagggagacattcacatgaatatctgcaaaacaccttttcattagcaaaactctggaagccagttccatgatcatgaagcggcttctagcagggaatgctatgctgcagttaaaggagtgagctagacccatgtgtaaccaagcacagaaagctgggacacactgtggagggaggtgagctaggtgtagagtgattgccctgtgtgccagaactgactgaaaagccacatgcacagtatggcccagtgctctgggctgtgcctgcacagcacaggaaaatggactctacactagtgacatgggtcctctccagagggatagaagaactgcatcagggacaggggtcaaaggaggcctttagctgtaactcaaacattttacttttttaaaggaagacgtatttattgcttgtgtactgaaaagtcagtgagaaaaaagggaaaagaaacatattaaggagaacgactaagctcaggaacgcccaggagtgcagggccatgcctggatgtgcaggctgaggctgggtcccaggacgcttcaaagaccatgagccacctagattccattctgcatggggaaggctggttctaaggactgtacacaaggatatcagagacaatgggttgcagaaggccaccttaggccaggtttgctgggtgacacctgttactcactgtcattcttaatagcacctcattcatctgaaaagtgtcctggtcttgataagatgcacagtcaccctagctacagggggcagggaatggctcacagcgattgcgccacccctacccctgggagccggctcatggtgacacaagcccacacaactaggttggggaccacaaaaatatgtgtccgtcccaagcctctgtgagcctcatctgttcatatgggtgctgttaccccattttcccaccacaggtaagaaaatcagtacctacctgcagtactcgacagcacccaccagcagtgccaatgtggtgccggtggcggggtgaactggggattggtggtagcccctcagtggggggagggagaactttttaagttacggaaatattctacacctcaactggagtagttacacaggtatacgaatttgtcaaaaatgcatcaaaatgtagcgtagagctaaataaaaagacaaatgtgaaagcaagacagacataactgtttaatgagggacttccactgccaaatgtacacctgaaataggcacattgtactgtatgtaaattagacctcactaaaggcagtttttaaattgttggaggtagaatcagaaagacagctgagaggaaagtccctaagtatggtttttaatgcctggagtttgagacaccagtgtgggcaggacacactgatgaggccaaagggggtcctcagactgagatgagaactgaaggccatgagtgaccaggtgaatgaacaacgcccatggaaaggggaaatggatagaacacagagacagtggcagcagcacctggggccaccatccacctgaggcaggtaggattggccaggctgccccactcactgcacacacacagtcagagagagcagcaggaaaggggacaggcacagggcgccctgccaggagcagtgtttctgcactgtcccagccaggcggcactagaggaaaggagaggagaggctcgggtgaacagggtgggagacatggcttggtgaaggcataggggaacaaggaggcaggcgggagatgctgggcaaggaggggactgacaggcagactccatggcaccgggaggaagaggcttgagcattcatcctgtaaatggatgacccttggaaatgaacagctgaggctgcatggcaccctgccagtcacaaagtgctttttcaaagttgtcttcctatcgaactcctggttacaaagagccaaagctctacatcactgtgtgcggatattcgtgcatggcaaatctgtcatccagacaggccagttttccccttcttccttcactcaaaactgaggcctggcaagggatagagcatcggatcactaccacaccagacagccagacagagccaagctgtagctctacctcgcccttagcgggtcatctggaatccacacgcctgggcccacggcagcaggtgaggtcaggagacaggccctgtggccagcaggagaggctgcggtgactcttgaatctcaggagactgtatggccccataaatgaggccagcacagtcagcacaaagcagcctgaagacacaatggggccgggtgcagtgactcacgcctgtaatcccagcactttgggaggctgaggtgggcggatcacctgaggtcgggagttcaagaccagcctggccaacatagtgaaacccccatctctactaaaaatacaaaaataagctgggtgtggtggcgcatgcctgtaatcccagctactcaagaggatgaggcagaattgcttgaacccgggaggcagaggttgcagtgagccaagatcatgccaatgcactccagcttgggtgacagagcgagactccgtctcaaaaaaaataaaaataaaataaaaataaaaacaaaaacaaaagacacaatgagggagggtttccattttttggaggggagcgggggataagcaaatgtggcattagccacgatgaaacctagagagatttttgatggctcagtgatgaagtcagcaacagtgactgccaccatctgggaggggagtaggctgagacagggctgctcgtttcccaggggaggggtgcctggcacacaccaagaagcaatgttggtgtctggcatcaggagcacttttgcaggtttggtgggaacccaaacccacctgggatgcacaatgcaactgctgcagacacgagaattcattcagtcaccttttcacagaaggctctccctgtgttggtcagtctggtctcaaacttctgggctcaaatgatcctcttgtctcagactcccaaagtgtcgggattacaagtgtgaaccactgtatctggtctcagctgctatttatctcctggaaaaataagaacgttggccaggcacgatggcatacacctgtaatcccagctaagcaggcaactgaggtgggaggatcgcttgatgccaggagtttaagaccagcctgggcaacatagtgagaccctgtctctaaaaaataaatagataataaaaataaaaatttaaaaattaaaaagttagccgggtgtggtggcatatacctgtagtcccagctactcaggatgctgaagtgggaggatcacttgagcccagaaatccgaggctacaatgatctatggctatgccattgcactcatgcctgggtgacagagactatctccttttgtggggaaaaaaaaaaaaaaaaaaaaggagcatgtccatattgtgtgcctcgtgccttctgaagaggaactcagggagcagacagagggctcacactcatgttggggaaggcaggcaacagacaagaccatagccacactaaaagccatgaagaaaataaacagtgtgattaatgtgagttgaaggcttccctcacaaccactgggccagatgaggtggtcacttcaaccccggagccctgagagaacccggggaggtaatacatctggagcaagaagcagtgcaagcttgtccaacccatggccctcgggccacatgcaacccaacacaaattcgtaaactttcttaaaacattatgagatttttttttaagctcattggctatcatcagtgttagtgtattttatgtgcagcccaagacaatccttcttccaatgtggctcagagaagccaaaagattggacaccccgatctagagcaagttgcatgataccctgcctccccttcagggcagctggctcctcgtgagccaatgaggggtgctagacagggccaatgggaaactacgatcacgagaactgtcccagcagccagctgcaaaggcgcagacaccatctggacaaggaacctgtctgtggcctgaagcccggcaagcaggccaaggggcaccagggccctggtgggcaaggctccaggcccaggccagatctccgtctgcacacgttccaatacatctcctcttctggggccgcgagccttcagcatccaagccaggtaaggggcagggactctacccaggtgtgtgctggagcctgctcacgccagctttactgagagagcaagcccgtggtgacactttcaggaatcaaaggagccattactaacaattacattatataagcttacaataagttgtgataagaacaaaggaggaagttttcagtactgtgtactcaaaactcatcacttcctacttattttaccaaacttagtactatctaggtttctgaggttattcatgactactgtatgggcatggaggacatggtgtgctactgagtctctttcccaacctcacattcagtgatctcatgttagtggcttgaagccagccatggtgagagtatttccaccacagaaatcagtaaacactataaatcagggcttgattttatgggctccaaactagaaatctgcaaactcctgggccattccataacactgtctgtttttgtaaatgaagattttacttttttcattttacatgctgtttattgaggtaaaattcacattgacataaattaaccacatcaagttttactggaacacagtcacgctcattcactcacatactgtctctggctgcttttgtgctacaaagatagcagtacaacagaagctctacggccatatggcctgcaaagatgaaaatatttactatctggccctttacaaaaagttagccaactcctggggtttagacttaagaaagtgatggagaaaatgttaataatgcaattaaacttaaaaagcgtgtcatgcctgaagtcattacattgggaacaggacaattgagaaaatattcttatagtacaggtatttgaaaactattatctaattcagcaaagacatcacttgactcattaatacaaagatatcgaccaggctggtgcagcggctcacacatgtgatcccagcactttgggaggctgaggcaggtgggtcacttgaggccaggagttcaagaccagcctggccaaaatgcagaaaccctgtctctactaaaaatacaaaaattagccgggtatggtggtgcacacctatagtcgcagctgcttagggggcagcatgagaatcacttgaatccgggaggtggaggttgcagcgagcggagattgcaccaccggactccagtctgggtgacagagcgagactccgtctcaaaaaaaaaaaaaaaaaaaaaaaaaagagagagaataagatattaaccaaagtcatgtcaaaaccaatcagaagctgatacaaaagctcagcaaaaatcaacggaagcagctggtgagaagcaattggctatatggaactgacaacagtgttgtatatttcattattatttgcaaattatatgccacccatcctttatactagtaaaactcataaacttacatgcatatttacatatgtatatgtatggatttcttttctttttcctgagagctggttgtcaaattttcaccagcacaccactgtctataccttagtatatgccttatgtaaattagagcttcattattttgaagtgcttgaaatagagtctgaatgaaactaaagtccatttgcattattgtatttcaacattacatataaatgaaaagattaaagaatctggattttttagaaatgccaactcataaatttttcaatgtttactaaaaaaaatgcttccaagttttatcaccttcttgtgcaaacaaaatttctccacaacaattatcaaagtcaagcaaaacagaaacaaaaacaaaacccacaccctaacatataaaagttatgttcttggacacaagcactctttaaaaaaaaaaaaaaaaaaaaaaaaaggcaatgttatttcagtaatgttattcaagccgggtgtggtcgctcacacatgtaaccccaaccctttgggatgccaaggcggccaggagttcaagaccagcctgggcaacacagcgagaccgtctctataaaaaatacaaaaattagtgaggtgtggtggctagcacttgtagttccagctacttgggaggctgaggcaggaggatcccttgagcccagtagctcaaggctgtagtgagctatgattgcgctattgcactccagcctggacaagtaaagtttttagagcaagactctgtctctaaaaaataataataataagcaaaaccttgcctctaaaaataataataatcataatgttattcaacacaagttcagtattaactatgctccctaacaccctgtattttattttccttataatttcttttttttttttttcaagactgagttttgctcttgttgcccaggctggagtgcaatggtgtgatctcggctcaccacaacctccgcctcccaggttcaagcaattctcctgcctcagcctcctggtagctgggattacaagcattagccaccacgcccagctcattttgtatttttagtagagatggggtttccccatgttggtcaggctggtctcaaactcccgaactcaggtgatccgcccgcctcagcctcccaaagtgctgggattacaggttacaggcgtgagccaccatccttataatttctatggtagaaacagcacatgcactttcccctagtctcgcctccaaattacccattgcaccctgtggatgccactgtttcctatgtgtgccatgacatggaaggctgaaagcagtgtgacagcaggagggcatgggctctgtataatgggtggccaggagaggcctgaagaagtccgactgtcacaagaactggatgagggagaaggttctcccacaagaatgagggcaagggttcaagttaagctgagaaaggaaagaagggcccaaggcctgtagcatgtgtagatcatgacaataaggaatgtgggcgtctattctaagggtgatggaaaaccactgaaggatgtgaagtgacagtggtgtcatctgcttatcggtatggaagggacaggaccaagagggaaatggccagggttggactcgagatggagggcagaggagggctggagaacatgcatcctggcagtagcccccgggcctcacaggtggagtaggtgactaaggtgagaggaaggcagaggcatggaccactccagggtgtttagcagagccatggggtgtggcttcactgactgtgtggagaaaaccaggtgttgtccagtcatttttggtgggatggacctctgggaacatgaagaacatgactggtggccttgactggagtgttatgttgcacactagtgttctgaaccttccggaaacgtatgagaggggaactaatcctctccactgattgcagtacatagaggcccgcaatccactccacagccgattgctctctatagtgctcaagtgctcttcaggctagagcagcctacttttattttcatttttttacagtttaattgaaaagacaatggagcataggggaaaacaaaccaacccattccccctgccccaaccaacacaagtgcttccattttaccccaagttctagttctttaggcatccagcctatccagatgcctgagtcacaaaaccactcctttccccctcatggtaaggcctgcccatttttctatagagccttcagaatcacgctttcggctataggctatttgactctgtggatgcaccatgattctgaagcttctcccatgctgtttaaaaataaacttcattaaaaaaaaaagaagtaaatggagacaaggtcttgttatgttggtcagtctggtcttgaactccttgcctcaagcgatcctgccaccttggcctcccaaagtgttgggattacaggcgtgagccaccaagctcagcctgtaaataaacttccaagagtaaaattactgggtcacaggacatgagcatgtctatgcctcttgctacataaatagtttccaagagggtgacagtggctctgagctcctgccaacagggtgatgcaggttgttgggggtggggtaggagataggccgggagagataaaacagcaacccgctggcttaacatccagtcttgattacccaccaaggccattctgcccacatgtttttgtgcaaggtatatgttccaggtatcaattacgtcaacatttttctgtccagtaaaatcttggagatcttatgattatgattactttttgtgtgtttggtttttttcttgagacagggtctcgctctatcacccaagctggagtgcagtagcgtgatcttggctcaccctagcctcagcctacacagctcaagcgatcctcccacctcagcctcccgagtagctgggactacaggcacatgccaccagccccacctaatgtttgtgatttctactacagacaaggtgtcactatgttgccaaggttggtctcaaactccttgcctcaagcgatcctcccacctcggtctcccaaagtgctgggattacaggctggagccaccatgcctagccacaattgttgattctaaagtatgtctctacacaggaagaatattggctattgcttctgaaaggcagcttcatgtgcacaaagttgtattttgatcatccccacctgcaactgcagcacagagagatttggaaaagtacaggcagcttttaaacctgcttgtgaatttcagcctaagcacctcttccaaggaagaggctctggaccctgacgtctgggattttgttctacaaccaatttcttcctgttttcccccgagggagcatttagaaatgtgtaaattatgcaatgttgtcttgtaactgctccttgctgacactaaaggaaagactacccttgaaaaagaacagcatttgtgaaaatcaaagttcagtatctacaaactcatctaggggtgtaataccccctagctcctgaaaagtcgagaaggggcttatacatgtttagtacctactaggtactaaatttcctttcaggcactgtttacctttagtaggatagggacgtcctcactttatagagagtattaatagcactgataaatatttgatgtgatttgtccaaggacatataacttggagacggagctgtagagattcgaatccaggtctaattcccaaactcttacatattaaatacttttctttctttccatctttctttctttgggaggaggggagaggaggcttagaggatttctagttgattgttaaacctattcatcaacctactcataagaaatgaaaagcctcccttctccacaagaaaagacctcatcaactggagctgacatggctcaaaggctctagagatgtcagaggccgtgtctggctggggaagggacacgggatcctctgcactccacagcagctcaggcacaaactcccccacttccgaggtggaaaaagacagcagagtccccagctctctacccaaggcgcttgacgggcactgtctaggtggcactggcttcacatgcatcccccttccctctacagtgggcagcagtgttatctccggatgaaagcaaaggctctgagggcagaaggagtcgggctcacagctgtgcagtgccagcgacctaacctcactatgcttcagtttcctgaatcagcccatctataaaatgggataattcttagcacagagtgagcacacagtaagagttgatgctgctgtccttgcaaccatttctgttatggccccaggataaagtccttatagtcccttatagatttacaccaaaggatgtcgagcccttggtttgtgaagtgggactggtaactagattcaatgagatccatgccctgggcttggtgacagaatcaatgatggagttaaaatcctcacttccccccttccaaccgcatggcctcaggaagacaacatcccaaactcatctgtcacaggaagacagtaccagcatcttcatgatcagggtgactaaatggaggctaggcattgtgccaggctctcaacatacctcaagccccacaggatggtatcaccaggtgatggcaacaccagctccatgtcacaagtaaaaagactgaggctcggagacattaagtgatctgctccaaggtcaccaaagtagaagcagctgagaaggacctgaagccttccagctaaggtccagaagctgtgctaagggtagtgtctggcccggcgcacggtctcacacctgtaattccagcactctgggaggccgaagcaggcagatcgcttgagctcaggaatttgagaccagcctgggcaacatggtgaaaccccaactctacaaaaattacaaaaaattagctgggtgtggtagcgtgtgtctgtagtcttagctactcagaaggctgaggtaggaggatcacttgagccggggacgtagaggttgcagtgagccgattgtgccactgcactccagcctgggtgacagagtaagaccccatttcaaaataaaataaaataaaataaaaaggtggggggtgggtggggagtgtctgcccaggcctggagggaggaggcacgtgcaggctcatgtgggcctgaggggttcaccaggccactgggtcctgtcgacggcttctggaatccccaaacctaacggaactgagcgatacacacaggacaggctcagcgcctgggtgcagaccatgccagtatggctccaacagacccctcgaaccatgggaggaatccaaagggctgaaggttggagagagccaagtaaccatcacaggaagggggcttcctccaggggtctggccaaatccagccgcagccacctcaaccccaatactaatcagctaaatgactaagccccactaagcctgaattcttacccccaagcccaactgggtcctcccaggttaggcaatgctacttctgtaatctgaagtcagaaatggacccacatccatttgtaaactggtcactggccctaacagaatgaatggctctctaaataccagcaagaaaacaaccaaccagtctttgcttcaaggggaatgggggtgggggaaatgacaggcaagtcagaccggttacaggaagcactgcgggaaagatcagaccaggatgcctgcaatagtcagaagacagggatgcttatggaggctctggaccctgagaccagagaggcaaggagggagagagggcaggtgatcaggtggggtgcacaaaaaggtcaggagctgactgatgagcagctgagcatggctggagcaggagaggaataagaagggctacctgacccagagcctggggcacaatgtgctcagatgattctttactgactctctcagttgcaagtgagggaaaagtcagctcaaatgggttttatcaagaaaggaaaccacaggctcacttagcttaaaaatttggggcagccaggcgtggggactcacgcctgtcattcatcccagcactttgggaggccaaggtgggtggatcacctgaggtcaggagttcgagaccagcctggccaacatgacaaaaccctgtttctactaaaaatacaaaattagctgggtgtggtggcaggcgcctgtaatcccagcaacttgggaggctgaggcaggagaactgcttgaaaccaggaggcagaggttgcaatgaactgagattgcaccattgcactccagcctgggaggcagagcaagactccatctctgggggagaaaaaaaaaaaaaaagtttaggacaggcttcacctcagaccagccaagccacaaggtcttagtcctctccactcctctgaccaggtcttaatcctggacaggctgcctccaggcagcaaaccccagcagaaaacagctcacatcctcttccattcaagtctccccaacctactccagcaaagtgctacaactttcacaggctctgattgggtcacaggtctgtctctgaaccaatcactgcccaggaagatgcagccccattactggccagtcctacctacattactaaccatccaatgggcatggactggagagaggaaggggcagctctcaggaaaacgaggatgcagagaccaggaggaaggccatgggagctagatgggctctctaccaccaagcctgtgtattattaggtagcatgcatgtgagcacccaggatgcttcaggcacagggccatgttccattcttaaaagccttcctatgcagcattttttacatctttctggaaaaacaaaggctgcaaacctaaccttgtcgaaggttgcaaggtgaatggcagagtcaatggttccaactccattctgcttaagtcctccacccaggagaaagactgtcttctccactatatgccacctaaagagctgagactctatccagccagcaacacgacaccaccagaaaagtcaaacatccctatctgttttcagacacacagaggcaggagactgactaggacactgctgcactagaccccctggaggtccagcttgcaggaagaaggactccaggatggccctaaggtggtctacagagcagtagatcatggcaccaccaacagacacagcacagcatgacaaaggcagagatgaagaaggtgtatccactttggagtgggctgtctagacatccaggcacaggagagagcaagtgtccaggtgccaacgaagctgtggctctgagactacctggggaaagtcttaagggccgaagaccgtgagcagtgctacacaaagccaaaacgcttagggggagcaggcaccactggaaagggttgtgtagagaaaaaagagaccaatgcagcaaggggcaagggaaccaggtaggcagacacccccccactgctaggccttgtcattcattccaagtgcccatggtgagcacagagaacagcgccctaaagagaagacaacctggcgtgacaaacacaacaggcatccttgtgcccaaggacagctcatcttcctaaacagatgatgccacttcctacttcccaacttgagggagcccaccacccgaccagataggaaaccgtgttcacagtgctctcaacacagaagaatcatcaccagggtgatgaggaggtgcccactcggtcacacccctaactccttgttgggctgacagcgtgtccagagaggcaatgcacaagtcttccacataccatccagcacaaataccacctgccaactacaccagaacacctaacgtgccccctccccattccaggccagggttttcaccattttccttcaggtacacagggctgcagcagcctgggggcacatgctgtttctgtctgcacaaaaggtcctgctccttcggaaacacctccctgacttactgtgggcactgccactttcttacaagaccctcccatggcaccccaaaccaagccagagtgtgtctcctgaagtttccggaactggaaactagaaagtaactcctgtctacaacaggtcaaactcaggagctgctgcctttcccaacacatgaagcagcccatccacaagacaggcggacacacagacacacacacatagtgtggaggaccagaaacagaaaagattccctctcccttctctccaccccaatttcaatcccaaacagcacttatttaagctcagctcagtgtttagaggaaggaaaaagctggggagcaaatgcggaggagctcacaggagagcagtgctgaagctttcctgggagaagacaggctcctcattcagaggcccacaagttcaggcacttgcttgcccaccaaccatcaaggtgagaaaatgaaatgcttgagaagctcccttaaggcagaagtgaaggtggaatacccattcacaaaactttccctcacagacgagctgagacttaacatgtggcccgtttccgtcacggccaggcaaaagggggagcagacaccaacatcaggtgcttactgagagcccccccagaaacacaaggtggggttggggaaatggaggctgcaaaagaaagatcacttgactctacccctctccattaaccgaaggggaagaagccaggccaggaaacacaggtacgagtttccggttacccagaggggaggcacagatgagaggaaacaggcaggacaatcagacccaacagatctcccagcctctgcccagggtccacaaattcagagaagctacaggaggggccacagctcttgcctgggtcacagcgcagtctcctcatgaccacaggaggcctggtggggttcaggccacctggaccgcaccacctcccccagcaatgagctccattccaggcagtgactgaagcaccaggagagactgtcaagacagggaggaaaaaacagcaccattcaagactgtctccagcccaggacaggatctgaagctgcagctggccagcacctgcactcggacagcgtgacagcgaggtccccaagggtgactacaggcaaatggagtctgtggtttaaccagaacaagaaggtactcacaactccacgcggtgacctcacaccagccaaaccaccctgttgctactctggaccttacatttcccatttttttccccaaaaactcccattttgccttctggagccaaggcccaactatttggcggtcacatcaggagaggtgatgacatcagtgcacatccatggacactggatccactattcttctcccgttaacaggaccttgatgtctcctgggaacatcccctctattgtgggactgtttgggtggaacccacagcagattcaggggtaagccaatcaactaattcaatcaaactgctaatccaatcaaagctcagagaaggcataaggaaacgtttggtggggcttccagcaaagagtcgggagttcggtgagggaaaatcctgaaactgctgggatggagaggaagacaccctactgtgtgaaggcaacactgcaaaagagggagacagaaaaaccaggtcctcacctgaccgcagacttgcctttgggcctgcatgaccatcagcccctttgtgtctaagctcctgccaccagcacagtgctaacctccctttagggctggacaggccacagaattagtataggaagtaaagacaagtgctgtgcaggcaaccaattaacacggaaggaaacaatgtgaaccaatgaccacccaaaaggataaaactgttcttattttatatcccttcacatcagtatcacgggtctcccactgacagcactgaaaagccagcttgctgactgcttgcctaggcaccatgcaagatgcacctgggaggtgaatggagttgggcagcatctataaagggttctggagggctggcctgcagaacaggagagccgttagctaccatggtaactactacatcaccctggggggaacgaggatgtggccacctctccatgcctaactcaagctgggccaggaacctgatgactagaacgggggacatcaaaacaagtcatcaaggggataagaacttaaacccagtgtgtgcagggggctgcccagagagccaatgtgaccaggagtgtgggtgggaaacagaagagtgcactaccgtgctgaaggcacaagcaggcagtggggctgccagggcctgggagtgctgccagcccactgggctctcggtgtgggccatgggtcacacccacctgagtcctcccagtaactcacccactgctgatgcctgcaccacagaacccccaccagagtcaaggccagccacagccaacgccctataaaaccatgctgtgcacccagcacacgaatacccgagtctccacagcagccacgaggctgacccaccaccagggtgtggcctggacaaagcagcaccctactttctcaccatagcaaatgaaaatctggggggatgtgtgtccaggaatgccatgttttgtcacatgaccaaaaaaggccgaaggatcgctggggacccaggcttcacagatgaagtgacatttgaacagtgtctagggaccatggacaggcagaaatctaagatcaagcgccgccttctctattagggtgaaaaatacctgacgagaaagagaggaaaacacacctcacaccccttcttcagccagttccagagaaagcacagagcattttagtgaccactgtcctcccagtctggcataagagcagtgcacagatgaatccagcataaacagctggacccaggcaagaaaggggagtgcctgcgcagcaagtgcccactggcctctcacatgacaagggaggcagccagcaggtggctgtgttccaaccccagcctcatcccatctagcctccttccagctgtgtccgctgagcctcagtttcctcactagtacctgcctcctgtttaatctacacctgctatgaagattaaatgtgttttgaatgcaggtgaagtgctgaaaaccgctggcacctaggacctgctcagtaacgctgacagccattcccaaaactggccctgtttacagtgagagcaccaagcatttgggcacccacgtgctgtggcagttctagacactaagggagcaacacctgctctcctacttgggcacttcacaatcacatggaaaatgtaaccaacaagacctgttatcagcaggaatataaggtgttaaaatgatgaatggttcctgagggagacggtcttggattaagccaggtaaggtttcagaaaagggaggcagtagggatgacaggaggctcccaactggaggcagcacaaaggtcaaattccaggtgtcacacacatacaggtaaggcctgctctcagagttacactgatgctgttttgatgacaagacagaacttcatttcgaagcatgactggattaggagtaggttctgtcctcgaattttctttaaaacagttactcaaagcacacctgttgttatgtgaagcttccagaaggtttctgatgataaaaatgaaccctcatactcaaaaaggtttggagccactaggctagaggaatttaaagggggaaaagttgtaggaactgggaaggaatggaattcaaaatgtaacatgtgaaaacacttcatgtttgcaagggtacaccttggaagacgcaatggagttcagcttccatgctgggcaccaccgatgtgggaagcggaagactgtcgtagttaagccctctgacatcagaaccacccagtgatggattcagacccaaggcttctggttcccttgtctgcaataccagacaaatcggtgaatctctcctagcccctaaaatgaagatgaagcacctaccctagaagtaattcaaagaagcaatgagacactccacacagtagtgtctggcactgtgtaagtgctcagtaaacagcggctgttcgtcttgcagcctctgctgcccaacagagactgctgctggcacacaggagaccgagcctaactctgcatgcaggggaaacctgatgagccccctgacgttttccaagattcattttcctgcagtggatgaacccaggaaactttgctgcagtcacagtaacatccaaaggcctttaaccccaattgcctggcaatccttgggatgtgagttcccagagggctgctggtacttcacctgacatgacccctctccttttgaataggctccacagagaatcgcagaacctcccggtacttggatggtcacagaatccaaaggcctatacacagaatccaagggcctgggtatgtccacatagccatctcacagtgcccccagactgtgttaagtcagctctgacaataatccaccacttccctaagcacatcacagaactctcaccttccccaccctaggcttgcctccaaaagccacacagagcaaatctaatccagagggtacaacaacaccccaaatactgaaaaccagtgccatgtaatgctaccccaaggcccttcccattttctcaagcccagacaccccaaccatacccacagacacagctcgacatctgcctgtgccccatcccacagcagagagggaaaactgtgcaataatttgccgactgttccttccagctctgttcccctcatgccagagacaacgcaagaagagcctgcctgcctgactacagaacttattctgaaaacctggatgatagaatatacttaagaaagccatctcatattcttaagaattctcaactgttttcaaataaggcacggggagaactgttccatttggacttgagacctgcggcaccatcaggccatccctgactgccgagcccacatgccacggcaccccacccaagctcgttcatgaccatgctctatctgccctcctccctatgaggcgccaagccccttgggcacaggggctgagcatcttcaggtctgtaccctctacacccagcacacgagcacttgctaatcagttagtgactgaaatgtaactgcagtgcctcccaaggcatggaatgtattcagagaaggcctttaaatacagcatgtagaattatcggtatgtctttcttactcaggaaatgcttcccggttcagggaatcccgatggcaaatccacaccctgctctaagagtgaaaagcggctgttttggaaggtgctccaagcatgggtgctagcgagaccacactggaatgaaatgtgctgcctctcctttactcactgtgccacaaacttggccacccattctgacaaccagctcctggtccccaaaggaaccaggcagacgtgggacagcctaccactaggaatacaaaggaaaagcacaacgtgcagtaacaaagcacccagtttccagaaggagatgatagtggggaagtggccaggggacccctcccgctggactggagtcacctggagtcagcctggttaaactagagctccatctgagaagatgctcgcagaccccaaaaccaagaaaaggaaagccaagtgtcctccttcacctaagagaccttggcgcccttaagctacatgtcctatcttacacagctgcccaggggctgacgtgaccatggtgcctttttacatctgtatccagaacaaagcccctgaccacatgctggtcttggacagtcctccagggctctgggacctccaaccaggacaacatattctgaggaccacccagaaacctcagtgaggagagactgtaaagtccactttctcctgagggacagaatgagtcaaagacaaggacatacacctgtgtcacaggtgatacttgctacctttccatttcccgaagtcagagaacaccacgctgctcctctcctgtgtcctggccacaatatacagagtaaagacaggagagtccctgaatctgggcaattgtggatcaggtggcatttacatgtttgggtttagggtcctctactattttggatagggtcagaatcaagagtccttcattttgcaatttacaccattctgcttttctgcagaataaatggcattttaagttaatatcaaaagtgctgtaatgttgaagtagagagcaaactggtcacacagattcatgaaaagttccacatcggttgctagttgccacaccgtggtctggcccaggtttctgtctgtgacagagaccttaagatgttcacgggacaggctatgtcatatcaccaccctgttagatgtaacataggtaaatccagccccaatctgtaatctcacatacacttgtaggggacgttacaggatcctcacacgttttcttaccagctcaaaaatgctgccccctcgtgcctcttccggagccatctctccaactttcaaggcagcgtggtggtgttcagagttgaaaggactctaaggactgtcacttaatgactctgggtaagtccctaactttggttccaccacctcccattaagtcagtaagaaacaaaagcattttatcctctgcttgcccctggagacacccactgagcagcacctattacctgatgctgctggcttctgcacctgcaaaaggggagactggctcccccactcacaaggctgttggggagaagcagaactctctgacagggtgccacacaaactaacaaagcatacaccttggtttagaattttgttagttgagaaacttcacacaatgtaccttgcaaagatatattaaaaaaaaaaaaccccttctagaacaattgacattagtctctgctgtcccttctaggatctgaacttagatctggaaggagctttatggggtgcatacaccagttcccaatcccaccctgtggacaagaaatctgcaggcaaaccaaggtaagcaacatccaaccttccaattcttaggtgggaaaatgatctttcttgctgtgtctctctgcagagtgcctcggtcacctctcccttggtctctgttgcctgaagagctgtgaaaaagaaagcagctcccaaggacgtttcccgctcagagcctggcagctggaggcactgacacacgcggccagggctagttcaagtccctctttgctgcgggaccttctcaggcctctccctggtctgaacacagggcattcacctgcagctagcaagccctgccctgtgcggttattttacttgccatgaggatgcagtacaccgtctactattcgtcggacctttcctctaaaagctaagtttgttaatcatcacttaacatctgtgttcctcacagttctactgagtagcatctcaagccacctgtgattcttccactctccaaagttctgcattagaatattccacgactgaactcttgggcataaagtggtcacaaaggcttcttggtaaaatggggctcaaatgtagctcctcaggcacaggtccaagatggatgctagggttcagtcagtttaagcagcaggtagaaagtgtgcctaatgcttctgctctagagggagaagacaagacaggaaacatccccaagaagcttgcgtgctgcacaggaagataaagctcatacctccacagaacgagtgtcccaggcagatgggaaccgaatcacctgctgaggagactgctcactatgactgctgtgcgagagtaagacacagtccttcactttacccacaatgcagtgagagtaagctggaacaatcatgcacacactgcgcttcggagagattttcaacaccctgggctgaaagggtgcacgacgaaaagaaaagctccaactgctctgaaaaactgttagtagccttttcaaaaggagagtagaggatttactttattactgaattggcagaaattattaactctgagcctgctgctataggaattcaaatgcatactccaggggctaaaagtgagagcacagaaactactttcctcctaagaattcctttgtcaaggagatggttggtaaacacgacttcgtcacttccctaactttccagatacttgtggatattaggtcagttcctgacaccgattttgcaagcaatagctaagtttgttaaccataattgcatgcccataaaggtaagcattacatgacacaattctctgccgcttctctcagaagaggtttaattttagtgttggctcttcaacactgtccccgtttttttttttttcatgagcatcttaaatatgtgtcaactaaatatccagtagtggagttcatcattgggcagggcagagaggagagagcggcacgccggcagcacctgtgctggagccacctgctctcacctgagcccacattgatccaagagaaactgcagacgcactgacatgcccggctctcaccatcacctccgccagcaatcctgtccaccgcggctctgtgtttctgcatggtgtttgctcaaagcaaacggtcctgtcaaatggcccataacagcgctcagagggtcaatcacaaaggaggcactttcctcattgttcatagtcaagaagataacttcccaaatccatccaccccatgttagtaggactctgcccaagatcatcactaaagtccctgaaaataagcggtatgaaatgcaaattccatgccagctaacataaccagggacctatatagcatttctgcatgtgctaagacacacaaaactaagatttgttccatcctcctttcttctgcctcaaggaaccctttagattagaaccctatacaatactggaaactgtgaggtcactggagtgacctaatctacaacactgtgatcgcctgtcaaagtgccgcctgatcccaaagctctctgaggtggcattaaggatcagtgctaatatctcagcaacctctcagactctccagaaggaaagcgagtgcgtgaaattaaaaaaattaccttccggctccacaaaagatgcacaagtcaccaaggctatttttttcatgtcactagttttatcctctaatatttcagtcttaaaattgcagtgacaccagttactgcaaaaaggacattctagaaggttttatatagcttgtgcccactccacccccaaagtcataacaaaaatgtacaatataacatttgttaaagacaattaccatcaagtcaatgttaatgggacctgaataccagggataagagaagtacttatatcacagcaaccagagccttcgaaaaaactcataacccttcagtcttaaccaaaaattgtataagccaatgtgaattattcccaaaacatcatcagagtgaagcatattgctaagagtaatcagccaagctcatgtaaaaatgaaagcaaaaacccctacggtgagagaaacctgagttacctggccaagccaaagatgatatttttcttccattcacagcacattaaaaagtgatctcaatggccacttcctgggaagcagggcctcccctcatacctggatgctactgcatcttcctaccgccctgctcctgccgcgggaagaatgacccctactgccaagaaactcttggagaaaatatgagaatagatcagtcttcccccccacccccccacccccgcaacaacacacacacacacacggaaggggagggggcggtccctccgcaaacagtagcctcagcaaaggggcacccgaggaagcgacactctggagttaaccccgacagtctgggtcaaaaaccaccaggctgagacccccaggtgagggaaagagcctactgaaacagagctcttgggtaaacgggagagaaaagtcctctttaattcactacctaaaaaatggagctctggcttggtcagagacgcaatgggtactgaggcccagaaaggcaacaggaaggatcccaccctccccgagatcatctatcgtcggcagcgaccccaagagggttttggcaaaggcgtgtctagtcacagaagggagacagactctccacgtaccctaggtacccggccaggggcaaaacagactgggggttctctccgaagccaggaaggtgctgccagccgagaggagggggaagaaggacttccctgatcacccaggaggccaagacatgggagacataggttccccgagtcataccccggacaccagttgcttcacagcccttctccctccccttcccgctccgggagggcttcccgggggtctcgggtcccggagggagggcgaggcagagaagcttcgtccagagcagtgagggtcgtagagctggagcagaaagggaggaaaaactctagcctcagctcccccgtctgcttcctccgcccaggccgcacggaagcctcggcctcacgtaccgagcgctgccgggctgcccgacctgcccccggcccgggcccgagaagcgagaggcagggatggcagcggccctcgaggggaggtgggcgccagacgggtcccccgaagcccggtgggcgaggggtacaggagagggggagggtcccgggcccatgcggcctccgtcccagctcgcgcggcgggtacttacgttgctctgggggtcgatggcctgcagcagccggtccctgatctgctgcggagacgccggagccgctgtcattgcctgggcgaggcggggggttgcggccgggccagcgggcgggcgggctgaggcgggggacgggggtcactcactcgccggcctccgggagccggagccgcatgttccccgcggcgccggggggttgggggcgcgcggggtggcggagaggggagccggggccgggtctcggtcccgggccgccgccgccaccaaaggaggaggaggagccgccggagccgccgccgctcgctgccgccgcctcgagaaccaaactccagtgagctgcccccgcgcggagtactctgggtagtccgcgccgcacgcagcgtcggcgccacgctgaggaggttgggagatggggcgggcggagacgccaggcctgggcggggctgcccgtgtgccacgccccgcgcctccgcgcaagcgcgcgcaggcgcactcgtccgcccgtgacgccccgcccagccgcccggcctaggcagccgttgggaggaggttgggcggggcaacggcccccgtccaggtcacggggcggggctttctgacggaagcgcgcgcgcaaagagtccttgaacccggacgctcgcagcggctacctcggggcggggagggcggcgggaaaatccttcctctgggagagccttcccggcgcgtgactgggggacgggagtcgcaggctgagcagctgccgagttttttgtgagggcgagggaaccagacgtccacgttgtgattctgcgcgcagaagggtcatcggagtccgggggtgtcgccgcggcccccccgcccctcagagggtgtgggaatgggtgtggtggcagggcgggggtctgcaccgccacgcgcgaccccgatcgcgaaaacgtgaggcggcaaagcgcctctggcagaagccgcccgccgtagctgggaaagccggaggttgcaaatctgcgtctacgcggcggcttctccacctcggcaccactggcatttgggcgggatcgctctgtcttcggggcgggtcccccgatctgtcggaagttgagcggcatctctggcctccgaagcgccccctcccccaatctgcagtcattgccgccgtcccttgtgggggcacagtccccccgcccccccaccggcagagaaccccgtgattgaaagacccttctacccgcctctgccttgagattctgtaaaactgagatgctcattctcttaaccaaacacgtcacagaggaggaaacggaggcccaaggtcacctagacttcggggttaagcccagaaccgcagatgtcaagtttaagggcgcccctcctccctccaccctgtttattgccttggtaattgctcccctctctctgggagctctgttggaaatgctcttgtgagacgggatggaaaggcaagctcggcggcctcgggagaaatcttttttttcccactgttacaggaagacctagatttaaaacaggaggaagacagctgatgagaaccacatgtgtgccttggagctgcccgacacctgttagtcttgtatttgttgtgcttctgggaaatattttcatttgcaaaaacggctgcttctgcacgtggctatggttgcgtgcttctgcacatgtgaaaagttttacatcacacttggaggagaaaagaaacacgggcaaaacacttgtcatttactgctcccaacctcgcccctcccagaatgcggtgcattgtgtacatggtgtacatggtccaagttggaaactggcccattcggagataattctctcatttctgataagcaaaataagcaaagccttcctcaggcatattctggtcttgcctctctcttaatttctaactcggatgtacagtatctttttttttttttaataaagtattacataggaggcaatttattttgcatgggtcaggttattttaagaaacatttgggccggacgtggtggctcaagcctgtaatcccagcacttcagcaggcggaggtgggcgatcacttgagctcaggagttcgagactagcctggccaacatggtgaaaccccatctctactaaaaatacaaaaattagccgggcatgctggcgcgcacttgtaatcctggctactagagggggctgaggcagaagaattgcttgaacccgggaggcggaggttgcagtgagccaagatcacaccactgcactccagcctgggcaacagactctgtctcaaacaaaatgtggggccagccacggtggctcatgcctggtagctcatgcctgtaatcccagcactttgggaagccgaggtgggcagatcacttgcggtcaggagttcgagacctgcgtggccaaaatagtgaaaccccttctctactgaaaaaacaaaaattagccgggcatggtggcacacacctgtaatcccagctactcagaaggctgaggcacgagaattgtttgaacccagaaggcagaggctgcagtgagctgagatcacgccactgtactccaacctgggtgacagagcaagactgtcttgaaaaataaacaaacatctggaaagtactcaacttacccactttttaaaaactaagaagcactgacatgacttggttcctcaagggcactggctctttttggtatccccagtagatagaaaaatagtatctgtggagtaagtcaatgaaaagtttcatcaaatacacggtagcgttacacacacccccagacatatgaatgcatttcagtttctacagatctggtacaccatgggtctggagagctatttctggaatgaatgaaatacttcataaaatataatactatatacaccaggatacacaacacacacacggatatttagttttattccacatttaatgtacgtaaaagggtgtttttgtaaatgcaaagattaaatcagacagcctctgaattgtagtcttgaaaacattagcaagttcttttaggtccagggtagatactgcagttcacttagccaactttctgcattgagacatccttgccagggatcctgtcagttatgcgaagatgcggcacgagataattcctcttgctgtgatggttcgtcctcaatgacaggtcccttatagtatttaggtacaacaaggtcttttgtgcttggaatgcccttgaaaaagctgcctcacctgtttgtgaagggaaccccaaagagaaagggagaggaagggctgggtgcagtggctcacatctataatcccagcactttgggaggccgaggtgggtggatcatttgaggtaaggagttaagagaccagcctggccaacatggtgaaaccccacctctactaagaatacaaaaattagccgggcatggtggtgggcacctgtattcccagctacttgggaggtagaggcaggagaattgcatgaacctgggaggcagaggttgcagtgagccaagatcacaccaccacactccagcctgggtgacagagcgagactccatcacaaatataaaataaaataaaataaatagaaaaaagggagaggaagtagttcagagtccatgacttgctcttgccatgggaaaaggcaaggaagttagtgtcaggaggtcaagtgcagagcatcttcagccaacctggacagtgagggagtagaaggatgcttctccctggactcactgctgtggcctaagcaggaaccgggatattcaagagcactgcagaggaagccgtgacgaggcaggttcacacagctgtacaggaatagtcttccacagcgacaccttgtaatagccaggagcaacagcaggaatgcgctcatcagacatgtcagaagcaagcccctgagagacaggccatttaaagcacagggttactaaacttaccctaataagggatgtgagggctccagggattaacagaaaaagccagtgtgacaaaaacaaccaccctcctttgacccctatgtttgctttaacaggcgggtggaattttttttttttttttttcgagagagtctcactctgttgccagtctggagtgcagtggcgtgatcttggctcactgcaatctccgcctttcaggttcaagcgattctcctgcctcagcctcccgagtagctgggactacaggcgggtgccaccacacccagctaatttttgtatttttagtagagacagggtttcaccatgttggccaggatggtctcaaactcctgacttcatgatccgcctgccttggcctcccaaagtgctgggattacaggcatgagccaccacacccggccgctggcagaaatttttaaaaccctttctcatatatgaactcattcaaccctatcagttatctcagaagtacctagagatgagtttcatagttctgcttggctttgcactaagtcttgtttactctaaaagtgaaaccaatttaaattggttttgactaaccttgacatgtcaaagataggtagaagacctcaattttttaatcccatcttcaagtagggatggggatacagaaaggttccagttctgaacgcaagccccggaacctggttggggggtgggaattcatgaatacaatactttaattgcactgtacaaacacaacacggctgggacaccaacgaatgaaaaaagtcattaactgtgaacattttttttttttttttttttgaggcagagtctcgctttgttgcccaggctggagtgaaatggtgccatctgggctcacctctacctcttgggttcaagtgattctcgtgcctcagcctcctgagtagctggaattacagttgcatgccaccatgcccagctaatttttgtatttttagtagagatgcggtttcgtcatgttggtcaggctgctctggaactcctgacttcaggtgatccacccgcctcagcctcccaaagtgctgggattacaggcgtgagccaccatgcccggccaactgggagcatttcaataagctcataccctctgaccctgtggatatgagcgtactgaaattcacaacttctaaaagtttatctgaaggaggcaatcagatgtagacaaatgtgtatgtacaaggaagttcactgaagcactatttgtaagagtgaaagattggaagcaatgtaagtgcctagcaataggggagtacgtaaataaactgtgattagttccccacaatgggaaggttatgaattagaaggcgccacagggagccttgtgggtgctacaataatctaagcctcaatgtgagcggtgacctcactggtgtttgtacatgtagaaattcaccaagctggccaggcgcggtggctcacgcctgtaatcccagcactttgggaggcagaagtggatggatcacctgaggtcaggagttcgagaccagcctggctaacatgatgaaaccctgtctctactaaaaatacaaaaattagctaggcaggtggtgcgcgcctgtaatcccagctgctcgggaggctgaggcagaagaatcacttgaacccaggagacagaggttgcagtgagctgagatggtgccattacactccagcctagacaacagagtgagaatctgtctcaaaaaaaaagaaaaaaaaaaaaaaaaaaggaagaaattcaccaagttgtacactgctgtaaattaaacttccaaagtaaattaagtgtgtgcgtgtgtgtgtgatgttgtcactaagaaaacctgtattgagctgggcacagtggctcacgcctgcagtcctaactactgggaggctgagacggttgaacccaggagtttgaagctgcagtgagctacaactgtgccactacactctggcctgggtgacagagcaagatcccgtctcttacaacaaaaataaagccactattgatggagaaacgctcccaataaataataaaatgcagcatataaactatatacattgtgatcttaattatacttttattaaaatatacatacttatgcacagagtgaatagaaaaaatattggaaggaaaccaaaatattgacagcagttatctctgatagatagaatgacagatgatgtttattttcttcttacactttttcctagattagttctgcattttccggcattcatatgtattgtttcccagccatcctgtcaagcgctgggattgttctgatctctgggagcctccagggctgactccagtatggctaatctaaagtgagcttgtaatctccaaaatcctgatggtggcttttctattaggcagactaatagattcagatataggtcccaacagtttgtgttttccttactgtcccagttttatatcattattcttagtactaaacagagtgacaacagggagtgacatttgttgaggacctacgatgtgtcagggtccatgctggggacttcacatgagggctccatgaagcccccttggacactcaggtccttgtgtcatccccacttcccgcccgccactgacgctggggtgaacctgcaactcactgtgactaagagaatgcagtggaaaccatgctctacccagtccaggctaaagctttaaggaggcctggaagttaccacacagcccagcaattctactcctaggaatctccctcaagaaaactgaaaacatggctgcgtgcagtggctcacacctgtaatcccagcactttgaaaggctgaggtaggcgggtcacttgagctcaggagtttgagaccagcgtagccaacatggcaaaaccctgtctgtactaaaaatacaaaaaattagggaggtgtggtggtggatgcctggagtctcagctatttgggaggctgaggtaggagaaccacttgaatccaggaggtggaggttgcagtaagccaagatcgtgccactgcactccagcctgggcaacagactgagactctgtcttaaaaaaaaaaaaaaaaaaaaaaaaaaggcaagaaaactgaaaacatatactcacagaaagacgtgcgtacatgtaaatgtccatagcagcactgctcataatagccataacgtgcagacaacctgccccacctgggttcctagccagccttctttctcaccactcttgagtgggtcttctcatacctgtcccactgggcacccaagcatgcaaccaagtgacgtggtcttcgtgcctcaaaggagtgacccagccaaagtcatgtggctgggatttggggctggctaaagagtccagcccgtggccgggcacagtggctcatgcctataatcctagcactctgggaggctgaggcaggtggatcacttgaggccaggagtttgagaccagcctggccaagatggcaaaaccccatccctcctaaaaaaaaaaaaaaaaaattaggcatggtggtacatgcctgtaatcccagctactcaggaggctgaggcaggagaatcacgcgaacctgggaggcggaggttgcagtgagctgacaagacagtacagcactctagcctgggtgacagagtgagacaccatctcaaaaaaaaaaaaaaaaaagtccagcccagagctcagggttcccagactctgaaccaaatcaagtataagccatttccccaaagagcagacaggagaggaccaaggtgctgatgtccaaaaccaactaggagggtggatctgaaggaaaaaaacaacaaactcaccctagccaatggagcttcccagaaacaaaggtgcagagttgtgccccaacacagaaggcaacatcaagagagtagccaggtgcagtggctcacgccagtaatctcagcactttgagaggccgaggcgggcggatcacttgaggtcaggagtttgagaccagcctggccaacatggtgaaatcccatctctaagagaacgacaaaaaatttagctgggcctggtggcaggcgcctgtaatcccagctacttgggaagctgaggcaggagagtcgcttaaacctgggagggagaggttgcaatgggcccagattgtaccactgcaatccagcctgggcaacagagcaagaccctgtctcaaaaaaaaaaaaaaaaatatatatatatatatatatatatgtatgtatacacaatttgaccctgtgttagcagagtacttgcccctactcccctaaatgtccccatcccaatccccagaacctgtaaatatgtcatggcaagggataattaagggtacaggtgaaattaacataactcatcaactgactgctggattctcctggtggccccaatggagtcacaagcgtccttaaatggggaagaaagaggtagaggagtcagaattaggagacagggtgtcatgaggaagacttgacaggctattggttgcctggaagatggaggaagaggccgtgaaccaaggatgtgggcagcctctaaaagctggagaaggcgaggaaaatttctccctgagagcctccagaaggaaccagctatgcggacacattgatgctagcctacagagacccattctgtacttttgacttccagaattgtaaagaataaatttgtggaatttttttttttgagagtctcactctgtcacccaggctggagtacagtggtatgacctcgactcactgcaacctctgcctcccgggttcaagcgattctcctgcctcagcttcccatgtagctggaattacaggcatgcgccaccacacccagctaagtttttgtatttttagtagagacaaggtctcaccatgttagccagactaaatttgttttgtttgacaccacgaagtttgtggttattttttacagtggcaagaggacacgaatacggctttaaagaaaaagctagccaggcacaatggcccatgcctataatcctggcactttgggaggctgaggtgggaggactgcttgagcctgggagttcaagaccagcctgggcaacatagtgagaccccatctctacaaaaaaaataaaaaaatagctgggtgtggtagcatgtgcctgtagtcccagctactcaggaggctgatgtgggaggacagcttgagctcaggaggtttaggctgcagtgagctaagatagtgccactgcactccagcttcagctacagagcaagaccctgtctctaaaaatataaagaaagaaaatttaaaagtaaagaaaaagtggatcattcggtcctttaagatgtggcactgcccaattagaactttcctccatgcaatgcaattacagtcactgaggcactggattttctagttttatttaactaagacggagactgaaacagccacacgtggctcctggctactgtgctgctgaacacaggccctcactactcaaaagtgtggtccgtggaccagcagtattagcattaccagggagctccttaggaacataggtccttgatcaggtgtggtggctcacacctataaccccagcactttgggaggccaaggcaggaggatcacttgagcccaggagttcaagaccagcctgggcaacatagtgaaacctcgtctctacaaaaaaatacattagccagctgtggtggtatgtgcctgtagtcccaggaggctgaggtgggaggatcgcttgagcctgggggaggttgaggctacattgagccatgatcgcctcacctgggtgacaaagtgagactgtgtctcaaaaaagaaaaagaaaagaaatgtaggcccttagcctgtacctccccagcctgttaggcagaatctgaattccacaaaaacacccccaagggatttaggaggatgttgaaatctgagaccctcccatggttgaggccaccagtcacttacacacaaatgccttcctctgcagcaccaggagacagagcccatcacagaacttctcagggtgcctcctacaccacactagctttgtgtgtttgttctttaatgcctcaaggcatactactagccaaggagagtaactaacagcagctgttgaacactatgggtcagactttgaccatctgttatggactgaattgtgtcacctacccatgactaaattcatatgctgaagctctgacctccaacagggactgtatttggagacagggcctttgggaggtaattaaggttaaataaggtcataagggtggggtgataagctgacaaaagggaggctggttgtggtggctcacgcctgtaatcccagcactttgggaggcagaggtgggtggatcacttgaggttagcagttcaaaaccaacctggccaacgtggtgaaaccccacctctactaaaaaaaaaaaaattacaaaaattagccaggcgtggtggtacgcacctgtaatctcagctactcaggaggctgaggcaggaagaatcacttaaagccggaggcggaggttgcagtaagctgggatcacgccactgcactccagcctggatgacagagattctgtctcaaaagaaccgtgaggcaattaaacctcttttcttttttctttttttttttttttttttgagacagagcttcactcttgctgcacaggctggagtgcaatggcacgatctcggctcactgcaacccctgcctcccgggttcaggtgattttcctgcctcagactcctgagtagctggatttacaggtgcccgccaccatgcccggctaatttttgtaattttttttagtagagacagggtttcaccacattggccaggctggccttgaactcctgacctcaggtgatccacccacctcagcctccctaagtgttgggattacaggcatgagccaccgtgcctggccattaacctcttttcttataaattacccatttctttatagcaatgcaagatggcctaatacacagctctagctgactaatataccaccatctcactgaaggcttgcaaaacccagctgagaaagtcttttaataaaagcaacaacattaataaaaacagtgacaactactgagtggctgcccagcatcaggcatgttataggcccatatcaagactgtctccttcactgtacccatatcacagatgaggacgtggaggtgcagaagggccaagacacagaacccaggtctgagctacacctccaacttgctttctgctgcaaccaccttttccaccttctttctcatgcacacaatgtactctaattagatgtaaagctttatttcccctaacatttccacagttcccttggcacagtccacactcttttgcctaggtttaccaccaactgccaagataataatgtaaactagacaccaatgaacaggaaacaggatccactagtaagatgtcatttttttttttttttttttgagacggagtcttgctctgtcgcccaggctggagtgcagtggcgtgatctcggctcactgcaagctccgcccccccaggttcacgccattctcctgcctcagcctcccgagtagctgggattataggcgcccaccacctcgcccggctaattttttgtatttttagtagagacggggtttcaccgtgttagccaggatggtctcgatctcctgacctcatgatctgcccgcctccgcctcccaaagtgctgggattacaggcgtgagccactgcgcccggtcataagatgtcatttttaaaaaactgtctagtccagagatcagtaaacttttccataaagggtcagaaagtaaataggttcagctttgcaggctgaatggtttctgttgcaaggactcaatcctgcccttatagtgctaaaggagccaaggatgatatacaaactaatgagcacaacagctgatataatttgcctgtgtccccacccaaatctcatcttgagttgtagttcccataatccccatgtgtggtggcagagacctgggggcaggtaactgaatcatggggtggttcccccatgctattctagtgatagtaagttctcacgagatctgatgtttttataaggggcatccacttcactcagctctcattcttctcctacctgccaccatgggtagaaggatatgtttgtttccccatccgccatgactgtaagtttcctggggtctccccagccgtgcataactgtgagtcaattaaacctcttttgtttataaattacccagtctcaggcaatctttcggttttttgtttttttttttttgagatggagttttgctcttgttgcccaggctggagtgcaatggctcaatctcagctcaatgcaacctccactttccgggttcaagcgattctcctgcctcagcctcctgagtatctgggattacaggcacccgtcaccacgcccagctaatttttgtgttttttagcagcagcacgatctctgctcactgcaacctctgcctcccaggttcaagcgattctcctgtcagccttccaagtagctgggattacaggtacgtgccaccacgcctggctaatttttgtatttttagtagagatggggtttcaccatgttggccaggctggtctcgaacttctgggattacaggcatgagcctccctgcccggccctttttatccttctttttctttttatagcatgccttttccttttacacaaacagcatccgtctttcatcaacataggaaaacatcaggaggcctgtcaaatatttcataaactcaaatttggtaaaggatataatgaaatggttgaaatgaaaagaaaatgccttgctaatgacagcttcgctggcttttcaaatctaaccacttcagaagagagcagatctcattatccaacatcgcactgctgctgttctgctgttctgaggagtctcagggagcctgagaggggtctttcgtctaactatcaagagaaagaggccagttgcagcagctcacgcctgtaatcccaaaacttcaggaggctgaggtgggcggatcacctgaggtcaggagttcgagaccagcctggccaacatggagaaaccccatctctactaaaaataccaacattatccaggcgtggtggtgggtgcctgtagtcccagctacttgggaggctgaggcaagaaaatcgcttgaacccgggaggcggaggctgcagtgagctgagattgcgccactgcactccagcctgggtgacagagtctcaaaaaaagaaagaaagaaagaaagaaaactgggttttggtcaattgattaaccacacttgaaaatgggagggaagatttctagcaaatttaaaaaatgtgtttgtgtatatgtttgttaaaatgcaggccacaagggtacagatgattccctgagtggctttgggagggaagggacaccttgggattctccatcacaccctagttgagcggttggcaaatttttctggtaagaggccaaacaggtgacattttccattctgcaggccatatggtctctgtgccactactccactttgaagttatagtatggaggttgctaaagcaattctaagtaatacacacacaaaggggtgtggccagattctaatacaactttttttttttttttttttgagatggagtttcactcttgtggcccaggctggagtgcaatggtgcaatctcggttcatcacaacctctgcttcccaggttcaagtgattctcctgcctcagcctccctagtaactgggattacaggcctgtaccaccacactcggctaattttgcatttttagtagagacagcatttctccatgttggccaggctggtctcgaactcccaacctcaggtgatccgcccaccttggcctcccaaagtgctaggattacaggcgtgagccactgtgcccggtcccagtacaactttttcttttggagacagtctagctctgtcgtccaggctggagtgcagtggaaaaatctcggctcactgcaacctccacctcctgggttcaagcaattctcctgcctcagcctcctgagtagcttggactataagcgtgcagcacgacacccggctagtttttgtatttttagtagagaaaggattttgccacagcggtcaggctaataagggatcgcctggctcagcttcccaaagtgtggggattacagttgtgagccaccgcacccggctccaataaaactttatttacaaaaacaagccgtgggccagacatgccctctgggctgtagtttgctgactcctgccctagagcagatgtacatgaagggcaatgagaagcgcgtgcaaaaatacattctccttcaatgtgcaatggtggaggaagcaaaatgggttccaacatgaaccccaagtgaacactcccagggtaggtgctgtacattgtggccttctctgcattcaccacccacagcttatcacttcggcagtgactcccagcctgtagccttgttttctaatacacaaaatctgaacacaaaccaagtgcccatcaactggggactggttaaattaatcatggtatgtctttacaatggcgtatttgcagttattaagaatcatattgtgattgagcacggtggctcatgcctgtaatcccagcactttgggaagccaaggtgggtgggtcacttgagggcagaagtttgagaccagcctggccaacatggtgaaaccctgtctccagtaaaaatacaaaaattagctgggcaggcacctgtaatcccagctattcaggaggctgaggcatgagaattgcttgaacctgggaggtggaggttgcagtgaaccaagatcacaccaccgcactccagcctgggcgagagtgagactgtctcaaacaaacaaaaaagaatgatattgtggttcatgcctgtaatcccagaaatactggaggccaaggtgggaggttcgttgagcccaggagtttgagagcagtttgagcaacacagggagaccctgtctctcccaaaaaataaaaataaaaaaataattagcctgtggtacatgcctgtggtcctaggtacttgggagactgaggtgggaggatcgtggctacagtgagctctcatcacgccaccacactccagccttggcaacagagtgagaccttatcttttttttttttttttttgagacagagtctcactctgtcacccaggctgcagtgcagcggcgcgatcatggctcactgcgacctccacctcccaagttcaagagattctcctgcgtcagcctcctgagtagctgggattacaggcgtgcgccaccacacctggctaatttttgtatttttagtagagacggggtttcatcgaactcctgacctcgtgatccacccgcctcggcctcccaaagtgctgggattacaggcgtgaaccaccgcacctggccaagtgagactctgtctctaaaaaaagaaaaaaaaagttattttagaaaacaacacatttgaggatatggaagtatggttacagtatcaggtgagaaaaccatgctggaagatactaagataacactgccaaaagaaaatgtaagcaccacacctagatgattatgcacagaagaaaggttggaagaatatgtacctagggtgatggtctccggagaatgtgactatgggtgatttatttttcctcttctagcaagtatgcatttgataagtttcttcaatgaatatgcattagtagtttaaaaaaaatttttcttttttgagacaggggtctcactgtgtcactcaggctgaagtgcaccactcggctcactgtaacctccgcctcccgagttcaagtgattcctctacctcagtctcctgagtagctgggactacaggcatgtgccactatgcccagctaatatatgtatgtttagtagagatagggtttcaccatattggccaggctggtattgaactcctggcctcaagtgatctacccacctcagcctcctaaagtgctgggattacaggcatgagccaccgtaccaggcctaaaaaattttttcaagcaaagtaaaacaaacaaaagccacttaaagccacaccaatggtatttaaggatattatggacccctccatggttatctgcccaaggaagctaatgccacaatagaagccaatgaagatcacaacactggtgccaggggcagccctgatcacagtggacaaaatataatccaagtccagcaacaaggtggctaaggacctatttactgacactgcaccgtaagtaaaaatgagaactgtaacacctcctagcaacaaagcaagtgtaaagaaaatgatgctgaaatgaacacagcagaactcatccttccttatccactctcaaaacatacatacaggaatatggaaaatgctgcatggggatggtgaagacaggaaaaggtttaccaggctggaaattgtttgcgttttttttttttttttttttttttgagatgttttgctcgtcgcctaggctggagtgcaatggcgcgatctcggctcgctgcaacctccgcctccctggttcaagtgattatcctgcctcagcctcctgagtagctgggattacaggcgcacgccaccacacctggctaatttttgtattttttagtagagacggggttttgtcatgttggccaggttggtctcgaactcctgaccacaggtgacctgcccactttggcctcccaaaatgctgggattgcagggtgtgagcctctcactgcactcagtctgtttgtaacttttttttttttttccgagacagaagatcttgctctgtcacccaggctggagtgcactggcacgatctcagctcactgcaacctccacctcctgggtttttaagcaattctctgcctcagcctcctgagtagctgggattacagggggcatgccaccacacccagctaatttttgcatttttagtagagacggggtttcaccatcttggccaggctgttcttgaactcctgacctcgtgatccacctgcctcggcctcccaaagtgctgggagccaccgcgctggcctctgtttgcaattcgtaaaaatgctgtcatcagcctttaatggtgtgtgtgcagactgcacaaagaaaagtggatgagaagacagaaaacacacacggtgatgatacccacagcaacaggtgctctcaggcactcagccgcattcgagttcattgaaacttacaacaaccttaggcacacactacttgcaggccgattttagagatgtggaaactgaggcttggagaggagaaagcaattagccaaggtccctctcagaatgagctgagatgggatttgtactcacacctaactgacccagaacattagtgcttaaacactgtgagacactaggcacccaaacttcaaactctgataacctctggtgccagtaaagttcttgaaaagcttccttaagagacacaaccatgagattccatttttaaaatgtacagcagccaccaaccagcatctgaaaaagccacgctgctattattaacaatgagacaacagttctctggagaaaaagaggactattgaaacaaaacctcaatgacaggattctcttctgagagcacgattcatccccataatggacaaatgcctcgcctcattgagacctccgcgccagtctgaataaggcaggaaggtttcttcacaccattcatctggcctgtgagggacccagccaagatcttggcgtgcctgttctgacagcgacaccggcctcagcaaagccagacccagcagctccgatctctgctacttacagaccttggggtgatgcttggctgagatttggcaaggaaatgaattgcagaagtgatcaaggagaattccacaacctgagaggcagcaaaagtggacttgaccctggtctagcaagagcccaccattagcaatgactctttcaatactttcaggagcagctccagtcaaaattccacttactcaattctttttttttttttttttttgagacagaatctcattgtctcacccaggctgaagtgcagtggctcaatctcagctcactgcaacctccgcctcccagatttaagcaattcttgtgcctcagccacccgagtagctgggattataggcgtgtgccaccatatctggctaatttttctatttttagtagagatgcgatttcaccatgttggccaggctagtttcgaactcctgacctcaagtgatccgcctacctcggcctcccaaagtgctgggattacaggtatgagccactgcgcgcagccccacttgcccaattcttgaccatcatttattgagctaaatccaaaaaggaaactctaccactgactcttttctttctcatggcctccaaaatgaatcctaggtttttccagcagggtaaattcaaaaggactcaggttggaaattgacttcttggttaaaaaaaaaaaaaaagtataaacaaaaggtcctttttagaaatgaggtttattttcaaggctactcagtcctaaaagcctgcatatttactttttttccttcctccaggtttacctccaagtcaggatttcaaaaaccaccaacattcaggctcattcttattggtataaacaaacaaacaaaaaaaccagacaacaaaaaactcaacaagcaaatcacacagttgtgggattcagcgccaaccccgggcgtttcattttggcaacaaaaccaggattccctttcaaagaagcttctggaaaatgctgtatttcctagatgaaggcccctggtttttcaacctcaaaatcacctactcaaaaagcagactcagaaacccaaggttttagaacatggtcccaatgtaccacatcataaaatcactctcattcctgcaactgtacaatgaatggctcccaaagtcattttatttaacaaaggggtcaaggcagaggaaagtttcccttaatatccccacaactgctccacatgtcttctgtggaaacacttcaccaggaactagctcaacactcttgctaacaatttagtgtctatacaggaaggctggtgtctctgttacaggtggcccgttccttaaagcctttagggttaatcgcagctgcactgagtggccaagcagaccctgttgggatgtgaaagcagtttgttaacagggcccctggccgggcccagaggctgtcagactcagcaagtaacactgaatgtccaaaaatacggctgtgttaaactaacaagccaatccttctgctcagatctctggatagaaatgatttttcttttatctatggggaatgcaatttcatcacagccccttacataaacgctcctgaaaccctttcagtagacagcatttcaattcagagaccaaagtgaaactatctttgaaaacagggacgtggctgggaaaccatgcacacctcggcgaacacttttccacccaccacgagcttggactttctgggaaggttgtcggttttctggtcaaaaacattcttgaagtcatcaggaatggaggaatggagactcggcatcccgggaaagtgagttcctggtttcatcgctgggattcaagagccgaacagcctggagaagtcagagggcagaaatgtctgtgaggataggaggtgactgttctaaaaatattgtcagcgattattttacatgactattacctattacttagatgattttacatgattgtctgattttttaaagtaacctgtgatccacctgtgaatataattaacaatactgaactacacagttaaaagaagaatatactctttttttttttttagacagagtctggctctgccgcccaggctggagtacagtggtgcgatctcagctcgctgcaacctctgcatccgagattcaagcgattctcctgcctcaacctgctgagtagctgcaattacaggcgcctgccaccaagccagattaatttttgtatttttagtagaaatggggtttcaccatgttggctgggctggtttcgaactcctgacctcaagtgatccacccgcctcagcctcccaaagtgctgggattacaggcgtgagccactccgcacagccaacaccaccaccctataagggaaagcggtacagctgttaaacaaaagatatatacaggaactttcggtattatctttgcaacatttccacaaatctaaactcattccaaaataaaaaggttatctgaaaaaaataagagtgcagaaacagctggatttccacatgcaaaagaataaagttggacccctgctttatgtcatataaaaaaattcactcaaaataggtcacagacctaactatcctccagaatccaaactacaaaactcttggaagaaaacttacgtgtacatctttgtaaccttgggttacacaatgatttcttactataatacccaaagcacaagtgacaaaaagacaaaaacataaactcaacttcatcacagttaaaaacttttttttttttgagatggactctcactctgttgctcagggtggagtgccgtggggcgatctcggctcactacaacctctgactcctgggttcaagcgattctcatgcctcagcctcccgagtagctgggattacaggcacccgccaccatgcctggctaatttttgtacttctagtagagacggtgtttcaccatgttggtcaggccggtctcaaactcctgacctcaagtgatccaaccgcctcagcctcccaaagtgctgggtttacaggcatgagccaccatgcctggccattcacaataaaaaacttttgtgcttaaaatgacaccatcaagaaagtgaaaagacaacatacaaaatgggagaaaatgcttgcaaaatacgcacgtgataatggactgataacgagaatacacaaagaacccttatggatcagcaataacccaatttttaaaaagggcagagaatcttaagaagacatttcctcaaaggaggtggacaaatggccaataggtacatgaaaatatgttcaatatcattaaccatcagggaaatgtgaatcaaaaccttcgaactggctgtgcacagtggctcatgcctgtaatcccagcactttaggaggctgaggtgggtggatcacttgagcccaggagttctggaccagcctgggcaacatagcgaaacccagtacttcttgtagagacaagaagtacaaaaattagccaggtgtggtagtgcacacccatagtcccactacttaggacgctgaggccagaggatcacttgagcccaggaggcaaaagttgcagtgagctgagattgtgccactgtactccagctccagcctgcgcaacagagtgagactctgtttcaaaaacaaacaaaaaactttcatacctactaggatgaccacagtcaaaagattaacggtaacagagttggcaaggatacggagaaagtgtaaccctcgtaggctgcaggtaggaatgtaaaatgtcgtagctactttggaaaacactctggtgttttctcaaaaggataaacacaggtcggctttaatctcagcactttgggaggttgaggtgggtggatcacttgaggtctggagttcgagaccagcctggccaacgtggtaaaaccctgtttcagccaggcgcagtggttcacgcctataatcccagcactttgggaggccgatgtgggtggatcatgaggtcaggaattcaagaccagcttggacaacatggtgaaaccccgtctctactaaaaatacaaaaaattaggcatggtggtgcacacctgtaaccccagttactcaggaggctgaggcaggagaatcacttgaacccgggaggtggaggttgcagtgagctgagaacgtgccactgcactccagccttggcaacagagcgagactctgtctccaaaaaaaagaaaattataaacgtagtgtgatcatataacccagcaatttcactcctatatagctcataactaaaaacataaatctgtacaaaaacttgtacatgaatgttcttgtcaccactttcataatagctaaaaaatacaaacatttcaactgtccaccaactgacagatggaaaactggggaatagtcatacaagagaatgattctgccatgaaaaggaatgaagcactgctccaggctacaacgtggatgaacctcaaaaacatgatgctgagtgagaggagctagacacaaaaggccatgcagtgtatgactccatttatataaactgtccacatgaggcaaatccacagagacaggaagccgacgagtggttgccagggactaagggaggggaaatggggcgtgactgccaatggggacgcggtttctttctgtgttgatgaaaatgttctgaaattggatagagatagcggctgcataatcctgtgaatattctataaaataccggattgtgaagacagacttccgccttttacttgtaaaacctctccatggttcattttctccctaacttttcctcttgttattttatgaaaatttcaacacacagaagagttgtgttgaaacacactgccaccacctacattctgcaattaacactttgctgtaccacatacctatccatctatctaaccatttatccgtatttttgatgtgtttcaatgtaagttatagatgacagtgctactgatccctaaatactcagggacgtttctcccctatttcagacttttcataacttcttaaactttccaaagctcaaacaacacaagagtgggcacagggagattgggcacggtggctcacgcctataatcccagcactttgggaggccgaggcaggtgaatcatttgaggtcaggagttcgagaccagcctggtcaacaggatgaaatctcatctctaccaaaaatagaaaaattagccaagtgtggtggtgcgtgcctgtagtctcagctccttgggaggctgaggcaggagaatcacttgaacctgggagatgcaggatgcagtgagctgagactgtgccactgcactccagtctgggtgacagagcaagactccacctcaaaaaaaaaaaaaaaaagaagaaataggcacacggaatattgaaccatgcccaggctctgccaatttcctcagcaactgccacagggtcacctctctaccccatctggagtggatccttccaactccctggctaaacagtgtttcactcccatacttaaggcactcatttaaggtttatccatggttactgcatgcacattacacagctgaagttaggctgcacagacatagtaccctccggccttcttcactttcagaacgtttcatttccccatgcagacagaaccttctggcacatcatcagtgatggtattgtgacagccagtcacatgggcatccttcaagttacctgatccttcccctgttcttggacacttaggtgatttccagtttttaaatatcctgggaaagccagtcactacctccctgagagggccctttcttgagagaatcttctctcacccatggcccccagtgaaagagttggcctgggtcagaggttggcacattttctctgtaatgggtgactgtttactaacagttctggctctgcaagccatgtcatctctgtcacacaactcaactccaccgctgtgacacagaagcagccacacacatgaacttttgcgaagttcattcacaaaaacaggcagtggggagatttggcctgtggtctgatgacccttgacctaagtggttatggcagaatcaagaacccccaccccaaatggaccagagtgacaccaaggtgggtcaatcagactctgccccaggaaacaaaatcaggaccctgggctactgactatgcaggtcttggaaagttgagctgggaggatgcccgaggctgctgttctggtcacagactagcagatgagggagtgaagatgctggtcaaacaggagaggatgatgaagcaggtgcacaggaaagacgagaatgagagaagcacactgacttcttccctgccccaggacctttgcaaagatgagaatgagaaccatgctgacttcttccctgccccaggacctttgcaaagacgagaatgagagaagcatgctgacttcttccctgccccaggacctttgcaaagatgagaatgagaagcatgctgacttcttccctgccccaggacctttgcaaagatgagaatgagaagcatgctgacttcttccctgccccaggacctttgcaaagacgagaatgagagaagcatagaagcatagtgacttcttccctgccccaggacctttgcaaagacgagaatgagggaagcatgctgacttcttcccttccccaggacctttgcaaagacgagaatgagggaagcatgctgatttcttccctgtcccaggacctttgcaaagacgagaatgagggaagaatgctgacttcttccctgccccaggacctttgcacatgccacttcctgtgccaccatgcttttctccagctctgcaaatggcaaacgtcttcttgtcctttaggtcttgatttattattatttgtttggagacagggtcttcttctgttgcccaggctggagtgcagtggcaggatctcagctcactgcaacctctgcctccagggctcaagtgattctcccacctcagcctcccgaggagctggaactataggcaggcgccactacactcggctaatttttttatttttggtaaagacagggtttcaccatgctgcccaggctggtcttgaactcctgggctcaagcaattctcccaccttggcctcccaaagtactgggattacaggcctgagccactgcccctggccgttcctacaatttcatgtaagttccttgatctcctcacaagccttctttgttcctaggcaagtctcatacatgctctcagatcctctctgccaggtaggataccttggcaacagtcttcctgggaatacatcacggtccttgtgatgagggtgaaatgccatcctccccagatctcctatgtcctggaagcatcttcgcaaacagccactggggtggcacgcagactggacagcaaccccacattcggagtctcaatcactcaggacagacaactttttgtcctctctctttctgggggaagcatacagggatggacccacagaggccaagaacaccagattctcccgtcgtgtcttttcctaaatccatttacagcaaatctcacaattcgttaacagtagtatcagagttatggccccagtgctagatggaaaggcaatctgcttgagttttctcagcctaatgagaaaatgaaaagccagaatttaaaacaataaagtctgaatacatttctactggcttccagcccaggtggagcaggatctggcagtgtgctggacatttaaaccatattttccacctcggcagatgcagaagaactggtgagacgtgacagggccatgggctcagggacggcatctcctggcagcccctgcagaggtgccgggcatagccgggggctggagaactccatgttccaataaaagttccagcccggtttggtggggacacagggacagagtttaaccccttcagatactggttccctcacttacttattttgaaaacagaaagcagggccgggtgtggtagctcacatctgtaatctcagcactttgggaggccgaggcaggtggatcacatgaggtcaggagttcaagaccagcctgaccaacatgatgaaaccctgtctcttgtaaaaatacaaaaattagccaggtgtggtggtgggcacctgtaatcccagctactcgggaggctgaggcaggagaatcgcttgaagcagggaggcagaggttgcagtgagccgagatcacgccactgcactccagcctgggcaacagagcaagactcgatctcaaaaacaaaaacaaacaaacaaaaaaaacagggccgtgcacagtggctcactcctgtaatcccagcactttgggagcccaaggtggacgaatcacaaggtcaggagatcaagaccatcctggataacacgatggaaccccgtctctactaaaaatacaaaaaatcagccgtgtgtggtggcacgcacctgtagtcccagttactcgggaggctgaggcaggagaatcgcttagacctaagaggccgaggttgcagtgagcccagatcgcaccactgcactccagtttaggcgacagagcaagattccatctcaaacaaaacaaaaaataaagaaaacagaaaccaggatacaagagtgatgactgaaaagacagagaatgaccatcaggtgggtcaccctggagaaggagactaagagacgacagtgaaaggaaagggcaggctggactcacacaatcatgcagaacatcatgaagatgttccacagggcgatgaagattcgaaagtatctgaggctcagcaagaattcccggatgttgtcacctggaagaatcagaaagcacttttatggcacagctaacatcccatccctactgccacctcagcagtggatttttgtgacttccacccacccggcgcttgctgcctccaacttcggcaacagtgtggcttttccttttggtttctccctcttccctaccctcatcaggctgtgtctaccactgaccaatcccctgaaagcaccaagcccctctgcctctgattggctcaagaaggggcatgtgacccaagtctgtccaatgagagtccaccctgggacttttcccccaactactgggaaagagataccttctgccaggcttactgagctgggaagatgtaagctcagtaagctcagtgcccacaggccaaatccagcagcctcttccacctgtttttggatggcctatgagctaatagtttttacttttttttaaaatataaagatggggttttgctatgttccccaggtgggtcttgaactcctggcttcaagtgatcctcccgcctaagcctctcaaagtgttgagattacaggcatgagtctccatacccggctggtttttacattaaaaaaaaaagaaagaagactattttgtgagacacaaaaattacaagaaattcaaatctcagtgtcaatgaataaagttttatggcacacagccatacccattcatttacatatcatgtcctgctgcttttgtactacaacagcagagctgagtcacattgttgtgccagacagacaccatatggcccgcaaagccctcagatatttactatgtggccctctacagaaaaacatgccaacccctgctctggggtcatctttgccaaccctaaccagtctcacagtaaaaccaacataaaagaaaggggaattgagagctgcagagagtcagatactgactctaaccctaaccctaaccccaactccaaccccaaccctaatcttgaaggactggtttgacacctaaacccagggtgcctgaaaacaattctgttggatgtttcaatttgctttaaccactttgagctgggtttgcagtgtttgtaactgaaagcatcctaattcaggcaagtgaaagggaaggtgtttcttggtgatgacttactctggtccccttgaatgccaaggaacagaaacccctccgagggaaggcaatttagtacgtgaagactccagagacctgggttctagacccttcttccagggtttccagtcaatcactctccctctcaagccctccagaatgaaaagaatgggtccagattaggccaggcatggtggctcacacttgtaatcccagcacttcaggaggccgaggcaggcagattacctgaggtcgggagttcgagaccagcctggccaacatggtgaaaccacgtctctactaaaaatacaaaagttagccgggtgtggtggtgcatgactgtaatcccagctactcaggaggctgaggcaggagaatcacttgaacctgggaggcagagattgcagtgagctgagatggtgtcactgcactccagcctgggtgacacagcaagactccatctcaaaaaaaaaaaaaaaaaaaaaaaaagaatggctccagattaggtgatctacaagggtgctacccgaagtatctgcagactggggctgcatggtaagtacagcatacacaacacaagcccagaaatttctactttttcagggatgacaacctgacatccctgctccatccgagcttgtgctgaacacaccatcttgctgaaaacggtttagacgagcctagtattatctagccgacaggattagtcacgtgcagcacaacctgtatacagggctgatccagcacagactagaaacattaaatgcttggtctgtttccaggaagttttgagaggcgctgctcagcaagacccttcccctagcgaaggatcgtgaaaacaggacctcccaccatcaacagatgccaatcaaacgttactcattccaggccgggtgcagtggctcacaactgtaatcccagcactttgggaggccgaggcaggtggatcacctgaggtcgcgagtttgagatcagcctggctaacatcgtgaaaccacgtttctattaaaactacaaaacaattagcagggcgtggtggcgcgtgcctgtaatcccaaatcctcgggaggctgaggcacgaaaatcacttgaacccaggaggtggaggctgcagtgagctgagatcacgccactgcacgcctgggcaacagagtgagactctgtctcaaaaaataaaaaaaggttactcattccaggcaacagcagtatacaggggatacagaaagaaacaaagaccggtggctctgccccaacaagcatatggggaggagaaatactaaacaaatattcacatgtgactgctctggtgggaaagtttgggtgtcctgggaatacacactgcagagacccaacatggcatgtgcatggggaagggtgggaggtaaaaaaaaagcctttccagccgggtgccgtcgctcaagtctgtaatcccagcactttgggaggccaaggagggcagatcacctgatgtcaggagttcgagaccagcctggccaacatggcgaaaccccatctctactaaaaatacaaaaattagctgggcatggtggtgggtgcctgtaatcccagctaatagggaagctgaggcaggagaattgcttgaacccaggaagcggagattgcagggagctgagatggtgccactgcactccagcctgggcaacagagagaggctccatctcaaaaaaaaaaacaacaaaaaaacaaaaaacaggctttctgaggaagtgccagagctccaagttctgacctcaaacatgggcagtttaacaaatgtgagctcaaatcctgcctctgtccttctgcacaggtgacctggtgacctgggaccatccctgcactatctatgtgcattccctcttgtgtcaataggggtgtcaggcagctaggaagaccttagcacactgcctggcacgcatgacgctctcaacaaatgcagccactatggtattacagttaagccaggcaaagaggatggagggcaaagagcagctcccacaggggaagcagcaggtgcagcacctgggctggaaggagactggacacagcaaagcaggaagctcctgacagagcactggtgccctgcctggcatccctgtcactgatgctcctgccactttgtgccaaatctcccgcccactggagctctgattcggatctgtacagtgcaactctagggcctggtagtgccttccacgtgggggttaagtaacacatggctgctgagtcaatgtatgaatggatggatcaatggatagacggacagatggtctagtgattgagtgcacaaccgctagagtcagaaaaacccaggttctaatcctgattctcattgattccctatgtggccacaaaaaagttgagccacatctctgaccctcagtttcctgatctgtaaaatgggaaagtgaccattatcttttaagaatggagggagaatgcaacactaacaggaagcacctaactgggtcagcacccaagggcaggcccccaaaaaggggagctgctggagtgtcttcaaaatctcagctcggccaggcgtggtagctcatgcctgtgatcccagcactttgggaggctgaggtgggaggatcgtttgagaccaagagttggacaccagcctggttaacacagcgagatacctatctctacaaaaaacatttagaaaattagccaggcgtggtagtaagtgcctgtagtcccagctacttgggagcctgaggcaagaggatctcttgaacccaggagctcaaggctgcagtgagctatgactgtgccgctgcactccagcctgggcaacagagcaagaccctgtctctaaaagaagaaaacctctgttcctcagggttcccccatccttgggcagtgctccatcatggcatccaccgccttgactgtgacgccgcctcctcaaatggccttcccttccacaccccagcaggagggcaaccccatcaccatcctgtgactccctgcctctgtcacctaacgtcacctctgtcactatctattccctgcttagaaaccatgtgtcccaccccatggtaagttccactctatctgtcttacccctgctgtaccccagcacctagcacagtagccagcatgcgttaggtactcaaatatctggtgaatgaaagaattaatgaatggatacaatagtcatgtacagatccccttaagactccaaatagttacacaatcaaattcagcaggaagtgtaaattctggggcctccagggcccaggcagatgatagacatatgaaggggttagggctgggatgaggcagagtctacaggccccacctcctcagagtccttctcaactacactcaatagatgcaaacagctctcctgaatcttgagttgcagaatgttccaatttttcaagaaaaatcagacatcttaatttttatataaaatctcctgattaaaaatctaatgttggcatctaattttaaaagtggcaggtctgcagcactctgaaagcaacagctatgtgtgaggttgttcattcattcattcacaggcatcggaggacgggtacggcaagaacaaaggatgggacaagccaagctagggcctcttctctgaagtttacagtcatatgtgaggggcagacattagccagatgacagcaaacataacagaacattataacggtaggaagtgatgtgagtgctcacatcagggaggtctggtaggagaaagaaatagatgacagaggtaggcagaaaggctagcacattctcagtcatctcccactcacacacacgctcaattaaagagaaaacttgtggctcacgcctgtaatcccagctcttcgggaggccaaggcagggatcacttgaacccaggagttcgagaccggcctgggcaacgtggagaaaccccatctctacaaaaaatacaaaatttagcctggcatggtggcacacacctgtaatcccagctactaagggggctgaggtggaaggatcactttagctcaggaggtcgagtctgcagtgagccatgatcgcaccactgcactccaacctggacaacagagcaagaccttgtgtcaaaaaaaaaaaaaaaaaaaaaagagaaagaaagaaaacgaaggtagggcttggcgaaacagaactgtcctctgaagtggaccatgcaattccaggatccaattagaccttacctgtgctgggctccctggactcctccccaaagccctgcgtgtccttctttttcctacaaagaggagcagacagtgtccactttcaatgggacatagagtcctcagccccctgacccccagctcagaaggccacaaacactaagtttcagccctggccctgccgcaaacttgctgtgtgacctctgacgttcaatacccttctctgggcccccactgcccggacaatcacagccaggtcagcagccaccgaccgtttacaaagtggcccgacagtgcgggtgcagggcggaaggtccgcggtggggctatttcttgggggatggggcttaagctctccaggaaggtgaacagagggacaaccaaggaacggagagtatgggtttaaggtctctcggggggtggggggcgaggaagataaaccaggctggaggcgtgcccagagggcggatagggcggggcctgcggcttgggggcggggcctgagaagtgcgccgagatcacgcttatgagggcggggctacgggttccccggatggagccgcagtccggccgcgacctactcacagcttaaagttcagcaccgccccggcattcatcagcaacgtcctgcagagggagaattacagttactaggggcgcccccgcgtcctgcctggctctctcttcccagcctctggtccccctaattacccgaacagcaggatgtctccgatcatcgttacggccgaagcgtccgtcagaaccggaagcggaagccccagggagggaggggagaggagcacaagccgaccaatcctaaagcaacagtggcgagggctgggccaatcgaaggtcaaggctgggagggtcccgccctctgcaggccagacccccttaggggagcgcgagcgccccacctcgctggggaggccccgagagccagaatgggaggagcggggtctcctgggggcgggattgggtcacgcgttcgaagcgtgccgcgcatgcgtgaggtctcgatgccgtagggttagctgggcagcaattcctactcactttctggggtcccaaattgggcttctggacaaaaggaatcctttgactcctgagctgcacagggtgcggggtcctgacgcagtggggtccctagaaacgggtgccccaaccaactgggctctaaaatgagatcctcctgggccccatggggaacgggggttcccactgagctgccccccacaagacgtcctgatttgcagagccccaccggagacggggttcctgatcgaacggaccctatggggcagaaaagtcttgacggggctccacagaggaccgaggtcctaacctatctccacggggaacaggggttctgattcatggggtcccaccatggcgtaggggtcctcactgggctccaccgaagatcggggtcctaattgagcccacggggacaaagtcctggccgatccggccccctgggaacgggcgtcccgcgtgggtgggctccgtgagggacgggcccccagaacaggcagctccccagcctccctcgccttgcacgggtgccccgcaccccgcctcgctgggcggaacggggtagcgatggcaggagggtcaacgcctgggacgcccgaccgtccagctgcgtccgtggtgctgggcgtccccaccacctgtcccggggtgggccgtcgcccctcctctcccgcgggggccgggcctggggtggcgcctggcgggcgggggcgggcccagctgcgggggcgcagtcgccgggccgcgggcggcgggacggacgaggccggggccccgggtggcacccggcaggcgggcaggcgggcgccatggagctgctctcggcgctgagcctgggcgaactggcgctcagcttctcgcgggtgccgctcttccccgtcttcgacctcagttacttcatcgtctccatcctctacctcaagtatgagccaggtgagccggggcggggggctggaggggaccggcagcgggtggcgcgggccggggcagctcgggggtcgcagagaggggaagcccgtgcgtggtggagggagcgagggacaggttcaaggattgcatcgtgggagtaggcaggcgctagaatcgtggggttctctcacgccggggtgagcccgggggagaagcccccaggacgatgaagctgggggaggggaaggagaggcgtgcgcgggtttagaggagggggaacaggtgcttggggtcggggctcctggttgggtcagagctgcaggaacttgggcaaggggcgccggctgtggcgagggtgcaggtgggggtcggtgcatctgttctggccgcgcgcaggtgtgacctccctccttgaccttggcacgcggattgagagcgccagcggagtgtctataagggccactgcgctgggggctgcggtcaggttcagcgaaagtgacaccggttctcctccccactgcaactgcccagcaccctccactcccctcccttcccccacggtgctgaatctccgagcccccacgggaattcttccagccctggctccagatcctttccacttacggagcagaaccggccccaaggctgggtgacttggggtcagtgtcctccatctcagctccagactccacgctggggaggtcacaggagggtacagcctgcttcttaatttttaaaatgaggatgaatggcttccttagaacgtgttctatttttataaaaggttcaccgtgaacaaatgtttaaatgtttcttgttcaccgttattctagaacaccagcaacttactagataatagattttaggcttagaaaaataaaggaaccccaaacttcataagcctttctcccacttagatgtaaattaccactatagctcagaaaggaaatagctttattctcagaggataaaaataagcgcccctgtttactaaaaactcaaactgaaaagggcaaaggaaaaaaagagaattactgtcaacatactggtggccagccacctttcttgatgtctcttctattcatttacggctatatagttataaacgtaaatgcacgcttttttttttttttttttttttgcggttttttttttagatggagtttcgctctgtcgcccaggctggagtgcagtggcgtgatctcggctcactgcaacctccaccttccaggttcaagcgattctcctgcctcagccttctgagtagctgggactacaggcacccgccactacacttggctaatttttgtatttttagtagagacaagccttcaccatgttggccaggatagtctcgatctcctgaccttgtgatccacccacctaggcctcccaaagtgctgggattacagacgtgagccactgcacccagccaatgcacgctcttatgctaacaggattacactctatttgctaggaatttttattctatttttgcctatccacatgccagagcctattttcttaaaagctatcctggagaacattactttgcaaaacaaaataggcttttgtgttgtcctagcatgaacatggggctatctttcctttctggggaagaattcttggtggttcaggccagttccttgggcagttgcagaaccttagaaaatctgaaactggctgggcacagtggctcacgcctgtaatcccagcactttgggaggccaagacgggcagatcgcctgaggtcaggagttcgagaccagcctggccaacatggagaaaccccgtctctactgaaaataaaaaaattagccaggcatggtggcacatgcttgtaatcctagctgcttgggaggctgaggcaggagaatcacttgaacctgggaggcggaggttgcagtgagccgagatcacgccattgcactccagcctgggcgacagagcaagactctgtctcgaaaaaaaaaaaaatctgaaactgaggagggttggagccctgtgggaatgtaggacacaaatgtcttgagaaaagaggtctccaagctgcctgggaacttgcaggaaggttcaagatatttctgcagaagtcctagaataagccatccaggctctaagtgccagagcctgaaggttcctgaaggctgagaagtggttccaaaccctggctattcatgaattcatgagacgctcctgggagctttttttcttttcttttttttttttgaaacggagtctcgctctgtcgcccaggctggagtgcggtggcgccgcctctgctcactgcaagctccgcctcctgggttcacaccattctcctgcctcagcctcccaagtagctgggactacaggcgcccaccaccatgcccggctaattttttttttttttgtatttttagtagagacagggtttcaccgtattagccaggatggtctcgatttcctgaccttgtgatccgcctgcctcggcctcccaaagtgctgggattacaggtgtgagccactgcgcccggcctcctaggagcttttaaaccccctatctccaccccccaccaattgaatcagaatattaatctcccctccctcagtgactgatgtctgttatcagggctgaggatactccacccagttcaacctcctcctttcataactggggaaacaggaaatagtggctaagctatcttaaatacacaatgagcctgtggtcccatggctggtcagttgcagcctcgggactcagcccaggtctgcttgactctaagaatcagtacaattgatgtgagattggtttccttagaaaagaaaggtgttggaggccagatgtgatggcttatgcctgtaatcccagcactttgggaggcgaggcgggtggatcacttgagcccaggactttgaaaccagcctgggcaacatgacaaaaccccgtctccactacaaatgcaaaaaaatagccaggtgtggtggcgcacgcctgtaatcccaggtacttgggaggctgagacatgagaatagcttgaatccaggagacggaggttgcagtgagccgaaatctcgctgctgcactccagcctgggtgacagagcctggctgagactctgtcttggaaaaaagaaagaaagaaaagaaaagtgaggtgtcggattgaactgttagtcccagtttggtgtgcgtgctgggtatctgtaaattttcttctcagaatttgtgtgctggaccagctacagaatttgccaggccgatacaaagtatcagtgtggggccttttgttcagaaattaagaatttcatagccaggcatggtggtgtgtgtctgtggtcccagctacttgggaagctgaggctggaggatcacttgagcccaggagttggagctcaactgcgcctggctgggtcaggctttcttgagaatcctgagaatggatgaagctcagagtgtggtcctcaacagagcagcatcaatgttgcctgggagctgcagcgagctatgatcaccccaccgccctccagcctgggcaacagagcaagaccgtgtctcctaaaaaaataataataataataaaaaaagaatgtcagcataggtcagataatctcagcatttggggaggtcaaggttggaagattgcttgaggccaggagttcatggccagcctgggcaacattgtgaaaccccttctctataaaaaatacaaaaatggctaggcgcggtgtctcatgcctgtaatccgagcactttgggaggctgaggtgggcagatcacctgaggtcgggagttcaagaccagcctgacctacatggagaaaccctgtctctactaaaaatacaaaattagccggacgtggtggcacatgcctgtaatcccagctactagggaggctgaggcaggagaatcgcttgaacctgggaggcagaggttgcggtgagccaagattgtgccattccactccagcctgggcaacaagaatgaaactccgtctcaataaacaaataaataaaaattaaaaaatgcaaaatacaaaaatattagccaggtgtggtggcatgtgcctgtagtcctagctactagggaagctgaggtcggaggattacctgaaccctgcaaggtggaggctgcagtgagccatgatcgtgccactgcactccagcctgggcaacagagtgagaccctgtctcaaaaaaaaaagaaaaaagaaactaaacgtctctgaatcatgggagtcagttctaccactagcactgagtaaacaccacaatggttatttcaccaccatgagcttcagtttatttgtctgtgaaatgggatcattggtaagagaaccccagactccctttcctagcgattgtaaagatctattgagaattttgtcagggataaggtctaaggcatttgtgaggggtggtgatgtttatttggaagtctagggaggaatatattacttgggatactggcattttctgggtcaggcttgcttacttttctgtttcttttcttttccttttttttttttttgagatgcagtcttgttttgctgcccaggctggagtgcagtggcacgatctcagctcactgcaaccttcacctcccagattcaagtgattctcctgccttagcctcctaagtacctgggattacaagcatccaccaccacacccagctaatttttttgttttgttttgtttttggagacggagtcttgccgtgtctctaggctggagtgcagtggctcgatcccggctcactgcaacctccacctgccgggttcaagcgattctcctgcctcagcctcccgagaagctgggattacagacacgcgccaccatgcccagctaatttttgtatttttagtagaaacggggtttcaccacgttggccaggatggtttcaatctcttgacctcgtgatccgcccaccttggcctcccaaagtgctgggattacagacatcagccattgcgcctggcccattttttttgtatttttagtagagatgagttttcaccatgttggtcagggtggtctcaaattcctgaactcaagtaatccacccgcctcagcctcccaaagtgctgaaattacaggtgtgagccactgctcttggccaatttaactttaaaaaaatttttttttttcgagacagggtcttgctctgtctcccaggctggagtgcagtagtacagtcatagctcactgtggcctccaactcctgggctcaagcaatcctcccacctcagcttcccatgagcaactgtgcctggctgggtgaggctttcttgagaatcctgagaaagaatgaagctcagagtgtggtcctcaactgagcagtgtcaatgtcacctggaagctgattagaaatgcagagcccctgcggtggctcatgcctatagtcccagcactttgggaagccaaggtggctggatcacaaagtcaggagtttgagatcagccaggccaacatggtgaaaccccgtctctactaaaaatacaaaaactagccaggcatggtggcgggctcctgtaatcccagctacttgggtggctgaggaaggagaatcgcttgaaaccagaagatggaggttgcagtgagctgagatcgcaccactgcactccagcctgggcaaaagagcgaaactccatctcaaaaaaaaaaaaaagaaaagaaatgcagagttctggccaagctcagtggctcacacttgtaatcctaacactttgggaggccgaggcgggcggatcacccgaggtcagaagttcgagaccagcctggccaacatggcgaaaccctgtctcttctaaaaatacaaaaattagccagtcatggtggcacacgcctgtaatcccagctgctcaggaggctgaggcaggagaatcacttgaaccagggaggtggaggttgcagtgagccgagattgcgccattgcactccagcctgggcaacaagagccaagagtgaaactccatttcaggaaaaaaaaaaagagaaagaaatgcagaacccaggccccacccagctctgcccaatgagagtctgtatttgagcaaaatctgcgggtgatttggctcatttctggggcctccaagctccatgtgaggaaagagaaggaagcagttgagtgctggctgcaaaactgaagaaatgagtgaatcaatgacaatcctggttgccttgagccttgacccatccaaagaatctctcagaccagtacttctcaaactcacctacacaccagactcacctagggagattttaaaaatccttttgggccagacgtggtggctcatgcctgtaatcccagcactttgggaggccaaggcgggtggatcacttgaggtcaggatcgagaccagcccggccaacatggtgaaagcccgtctctactaagaaaaaatacaaaaattagccacgcatggtggtgtgcacctgtaatcccagctacttgggaggctgaggcacaagtattgcttgaacgcgggaggtggaggtttgcattgagccaagatcttgccactgcactccagtctgggtgacagagcaagactccgtctcagaaaaaaaaaaaaaaaaatccttttgtcctgattgtcacccctctttcatttaaatcagaattgtgggtcaggcatggtggctcacgcctgtaatcccagcactttgggaggctgaggctggtggatcacctgaagtcagaagtttgagaccagcctgaccaacatggtgaaaccctgtctctactaaaaatacaaaaattagccaggcgtgatggcgggcgcctgtagtcctggctacttggtaggtcgaggtgggagaatcacttaaacctgcgaggcggaggttgcagtgagcagagatcatgccattgcactccaacctgggcaacagagcaagactctgtctcagaaaaataaataataaataataaattaattaaataaataactcagaatcatggggctgaaggaggtggctcacatctgtaatcccagcaagttgggacaccaaggcaggcagatcacttgaagccaggcgttggagaccagcctggccaacacagtgaaaccctgtctctactaaaaatataaaaattagtcaggcatggtggcgcaagcctgtaatgccagctactccggaggctgaggcacgagaattgcttgaacctggggggaggcggaggttgcagtgactctgtctcaaaaaaaaaaaaaaaaaaaagagatgggggttctgttgtgttgcccagggtggtcttgaactcctgggctcaggagatccacctgccttggcttcccaaagtgttgggattacagacatgagccactgcacccggccaaccactgatctttctttctactacctccagagttttgccttttccagaatgtcctttagttggaatcatgcagtatgtacccctttcagactggcttctttcacttaggaatatgcatttaaggttcctccatgtcttttcatgtcttgatagctcactggataatatttctttcttttttctttttctttcttttttttttttttgaaatggactttgctcttgttacccaggctggagtgcaatggtttgatcttggctcactgcaacctctgcctcccaggttcaagtgattctcctgtgtcagcctcctaagcagctaggattacaagcatgtgccaccacgcctggctaattttttgtatttttagtagagatggggtttctccatgttggccaggctggtctcgaactcccgacctcaggtgatctgcccgccttggcctcccaaagtgttgggattacaggcgtgagccactgcacccggccaaatagtatttcatagtaaggatgtttcatggtttgtttatccactcactccctgcaggacatcttggttgcagttttaactttttttttttttttttgagacggagtcactctgttgccaggctggagtgcagtggtgtgatctcggctcactgcaacctccggctcactggttcaagcaattctcctgcctcagcctcctgagtagctaggattacaggtgcccgccaccatgcccagctaatttttgtgtttttagtagagacagggtttcaccatgttggccaggctagtcttgaactcctgacctcaagtgatccacccgcctcagcctcccaaagtgctgggattacaggtgtgagccaccacacccagacaagttttaacatttttcatatgctgttaggaccaaagaaaaccattctttgatccctgatttgagatctctggtttgaactacaagctttttgagggcaggaggctgttgactcctgctccaccttgtgagggagaggctgctatctccatttaacaggggaggaaactgaggcagaatgctgagctcaaaagctcaggaggagaagactggtcctagagtcactgagagactcggtcagtaccccatgcttcatacacctctgactgaatagcacagtgctagagtgccctggggacccttctagtaccacccagtcatctgcaaatgaggcattgacccctgaaaagggaaagtcacagagtccattgcagaccaggacttagggacccaaagctttttcctctcttctgaggcagagctgatttttttctgtttgtttatttatttatttatttttattttattattttatttttttgagacagagtttcgctattatcgcccaggttggagtgcagtggcgcgatctcagctcaccgcaacctccgcctcatgggttcaagcgattctcctgcctcagcctcccgagtagctgggactacaggtgcctgtcaccacgcccagctgatttttgtatttttaatagagatggggtttcattctattggccaggctgatctcgaattcctgaccttgtgatccacccgcctcggtctcccaaagtgctgggattacaggcatcagccactgcgcccggcctgttttttgtttttttttttttttgagacagagttttgctcctatttcccaggttggagtgcagtggcatgatctcgactcactgcaacctccgcctcccaggttcaagcgattctcctgcctcagctgccggagtagctgggattacaggcatgagctaccgtgcccagccgaggcagagctgatttttaaaaaatccatctactgaaatttccacccacaggtactttccatttccgcactgttccagaaatacctcttgcgtcgttgctaggcgctaagcaatctctttttcaccctcacaggcatctttggaaatgactgatatagatctggtgtggtcaccttgtccaggctttcccaagatgagcatcgaaagtcccatgtccagccgggtgcgggggctcatgcctgtaatcccagcactctgggaggccgaggaaggtggatcacctgaggtcaggagtttgagaccagcctggccaacatggagaaatcccatctctactaaaaatacaaaagttagccgggcctggtggcgggtgcctgtaatcccaggtactcgggaggctgaggcaggagaatcacttgaacccgggaggtggaggttgcatcaagccaagatcgcaccactacactccagcctgggcgacagagcaagaccccatctcaaaaaaagaataaaagaaagtcccatgtcccaggaaacccctgggacccaggcaaagggggatagttggtcaccctagaccgcctccccctcctacatatgggcaaactgaggcccagggaagggagggactagcctaagctcacccagtcagaggggaatgtgttcatggcatgcggcagttgaaaacctattggcttcatggggctgtcccaaacccatcaagagaaaccaaggagtatggaaaggggaaaggacctgggcttttttttttttttttttttttgaggcggagtctcactctgtcactcaggctggagtgcagtggcacgatcttggctcactgcaatttccgcctcctgggttcaagcaattctgcctcagcctcctgagtagctgggattatagccatccgccaccatacccagctaatttttgtatttttagtggagacggggtttcaccatgttggccaggctggtctcaaactcaaactcctgacctcaagtgatccacctgcctcggcctcccagaatgctgggattacaggtgtgagccactgcgcctggccgtcatcttggtcttttgacagtgaagcaaactaaggcttgggggggcaggcagtcacttgcccaaggccatgctagagtgagtagcagagccagaagctaggcatgtgatgaggttttgccatgttgcccaggctggtcttgaactcctgagctcaagtgatctgcctgccttggcctccgaaagtgctgggattacgggtgtgagccaccgcgcccagccggcatgtgacttttatagcagggcacacacatactgcaaacatgggcatctgcccgtcagagcgtaactcatgcaaacgctaggtccctacccccactccccaacctcggtccctgggatgatcccagagggcacaagaaagatcctggaaagaattcagtccctgggagttatttttagatgcagaggtatccatttctgcaaaacatgggtgcctcacccgacctggcctctgcacaggccaccagctgctctgagggattaactctcagccagttgtgttttaaatagaccctaggagaggagctgaagcattttacctcataccctaggaccttggtcaatggtaagacgtaggacaaccttgagagcagggagaagctgcattttgggctcataactccagggtgaggttagaggagggaaaagctcattccagtcctcatcaggagttagacaaagaagcaacgttctactttgttttttaaaaaaagagatgtggagagaaaaaagtggcttgttcaagatcacattgttagttggtggggatagcgaggagaggggcaagtgtattgattacttactctaaaacagggatgtccaatcttttggcttccctgggccatgtttgatgaagaattatcttgggcctcacataaaatacactcacactaacgatagctgatgagcttaaaaaaaaatcacaaaaaaacctcattttttttttttttttttttgaggcagagtcttgctctgtggcccaggctggagtgcagtggtgtgaccttggctcactgcaacctccacctcctgaattcaagtgattctcatgtctcagcttcccaagtagctgagattacaggcgcatgccaccacgcccggctactttttgtatttttagtagagatgggggtttcaccatgttggctaggctggtctcgaactcctgacctcaagtgatccacctgccttggcctcccaaagtgttgagattacaggtgtgagccactgagcccggccataagtgtatcattttgcagcccaaccttttcactcagcagtaagcttatgggacttgtctttgttgatacatctaaaacagagattctcaaccagaagggattctgttcccaaaggataaatttggcaatatctggagacattcttggttgtcacagctgtgtggtgccactgtcatctagtgggtggaagccagggatgctgcttaacatgctataatgcacagaatgcccccatagcaaaaaatgatctgatcccaaatgtcaacagagctgaggttgaaaaaccctgatcaaggtctagttcacttttctttttctttttgtttgtttgtttgtttgtttgtttctgagatggagcctccctctgtcgcccaggctggagtgcagtggcgcaatcttggctcactgcaacctccacctcccgggttcaagcgattctcctacctcagccccctgagtagctgggattacaggcacctgccaccatgcctggctaatttttgtatttttagtaaagacagcgtttcaccatgtcggccaggctggtctcaaactcctgacctcaagtgatccgcctgccttggcctcccaaagtgctgggtgagccactgcacccagcctggttcacttttaaatagctactctatggcactccacattttgtggcttcccacagctttactaagagactgttgatttcacttttctcctgttgcaacattgtatcagtgaaacatcttccttctctaagtctttgtttatggtgcttgtttctttggggttaatagcaaggagtggaattgctggggtccaggggatgcacagcttcatatttccctggtattgccaagttgcctctaacatggtaatgcccactgatgcgctcacctggatttgtaggagaaactctggcattgatgattatttccccctgtgaggttgaccaagctaagaagaacgtaattccttttacagagtagagtgcactacacctttctcaattaataaatggaacagagaaggtcattgttgttacaatgtcaccagaaatgcgcaggcctgctggtggctcacacctgaaatcccagcactttgggaggccaaggcaggaggatcatttgaagccaggagttcaagagcagcctgggccacacagtgagatcctatctttacaaaaaaagaaaaaaaaaaaagtataaaaattggccaggcatggtggcacacgtctgtactcctagctacttggaaggctcaagcccaggagtttgaggctgcagtgagctatgattgcatcactgcactccagcctgggtgacagagcgagatgctgtctcttaaaaaaagtgtccagggccaggcgctgtggttcatgcctgtaatcccagcactttgggaggccaaggtgggtggatcacctgaggtcaggagttcgagaccagtttggccaacttggagaaaccccctgtctactaaaactacaaaacttagctaggcgtggtggcaggtgcctgtaatcccagctacttgggaggctgaggcaggagaatcacttgaacctaggaggaggcggagattgcagtgagccgagatcacaccactgcactccagcctgggcgacagagcaaaactcttgtctccaaaaaaaaaaaaaaaaaaagttggggggatccaacacaaccatgatgactttatgtttgctagaatgtaaattccatgagggcagggacctcacctgtcttgttcattattgtaataccaggacccaaggccgggcgccgtggctcacacctataatcccagcactttgggaggctgaggtgggcagatcacctgaggtcgggagtttgagaccagcctgaccaacatggagaaaacttgtctctactaaaaatacaaaattagccgggcgtggtggtccatgcctgtaatcctagctagtcgggaggctgaggcaggaggattgcttaaacccaggaggcagaggttgcagtgagccaagatcgcgccattgaactccagcctgcgcaacaagagcgaaacaccgtctcaaacaaacaacaacaacaaaaaaaaaccaggacccagagggatgcacatttcccataaattcattcacagttatttcttgaacccatacaatgtgtccaacacagcccccattcagtggcagagaaggcctccgtggttgctgaactcacggagggatgaagatcaaatccacccgttgaatgtatcattagtatatacagatttcttaatctgttgcagatgctataatctgttgcagtggcaataaaccagtagaccaggtggctgataaacaacaaatttatttctcagagttctggaggctggaagtctgagatcagggcactaacatggtcaagttctaatgagggccctcttctggcttgcagatgatcaacctctccttgtgtcctcatatggtagacagcagagagcagcaggctttctcatgactcttatttgtttatttattgagatagagtcttgctctgtcacccaggctggagtgcagtgccttgatcacggctcactgcagcctcaaccttccaggctcaagtggtcctcccacctcagaagtagctgggaatacagacacctgccatcacgcccagctaatttttattgttgttgttgttttagagatgagatttcactatgttcccagggctggtctggaactcctaggctcaagagatcctctggcctcagcctcccaaagtgctgggattacaggtgtgagtcaccacgcctggcctctcttgactatttttttttttttttttttttagagacagagtctcactctgtcgcccaggctggagtgcaatggtgcaatctcagctcactgcaacctctgcctcccgggttgaagcgattctcctacctctgcctccctagtagctgggactacaggcgcctcccgcaacgcccagctaatttttgtatttctagtagagacagggtttcaccatattggccaggctggtctcgaactcctgaccttgtcatctgcccgcctcagcctcccaaagtgctgggatgacaggcgtgagccaccatttataaaggctctaaccccgttcgtgaggggtctaccctggtgacataatcacctcccaaaggcccgacctcctaatgctatcacaagcggggaggggtaggatttcaacatacgaattttggagagacagaaacattctgtccacaacagacactctttctcttccctgctaaaaatagacaaaactgattatttcttttgcttagtcttttgatttgactaataagagatcacattttggccgggcgcggtggctcacacctgtaatcccagcactttgtgaggccgaggcaggcggatcacgaggtcaggagattgagaccatcttggctaacacagtgaaaccccgtctctactaaaattacaaaaaattgggcgtgctggcgggtgcctgtagtcccagctactagggaggctgaggcaggagaatggcatgaacctgtgaggcggagcttgcagtgatctgagattgcgccactgcactccagcctgcgggacagagcgagactccatctcaaacaaaaaaagagagagattacattttgtgaccttgttatctcatgtcaatactgactgtagttttcatttcattagaataagttgtattaggggaatcgttggttttggctctggtcatgtaatgtacagagtagctgtaccttacaacttgatcataaagttgttctctgcaaaacgaaactagttgggaaagacagaatcaatatgatgaaagaagtggtcataccaggagacacaagttctaactccaaggtgtggccttagaagattacgaagatacaacataaggatagaactatttataaagattataaaggctttacatgagtaatacaagatgcaaggatttagtgaatagacattaatactgtaccccgagtgttgcattttcatgacctttttttttttttttttttttgagaggtagtctcgctgttgttggcctgggctggagggcaatggcacgatctcagctcactgcaacctctgcctcctaggttccagcaattctcttgactcagcctcccgagtagctgagattaaaggcgcccaccaccacgcctggctaatttttgtatttttagtagagatgaggtttcaccatgttggccaggctggtcttgaactcctgacctcaggtgatccacccacctcgccctcccaaagtgctgggattacaggcatgagccaccgtgcccagccctttttttaaaaagaaaaaaaaaaaaaaagcccagctataggacctaaggactcagcaatggggttttcaagcccccttctttttaatatggaattttaaaatacttcttatcttggaagagtttatgactcacaagaagttgcaaaaatggtacagagaatttgcaaataccctttacccagcttcctccaatgacatcttatgtaatgatagtgcattattaaaaccaggaaattggcatgggtacactatcattaactcaactacagactttatatatttattatttttgagacagagtctcattctgtcacccaggctggagtgcagtggtgcactcatggcttactgcagcctcaaactcttgggttcaagtgatcctcccaactcaacctcttgagtagctgggactacaggtgcatgccaccatgcccagctaattagaaaaaattttttgtagagatggggtctcactgtgttgcccaggctggcctcccctccccttccctcccttcccctcccctctcaacagggtcttgctctggagtgcagtggcatgctcatgactcactgcagcctccacctcaccagctcaagtgatcttcctacctcagcttcccgagtagctgggactacagaagcatgccaccacgcccagctaatttttaaaattttttgcagaggtggggtctcactatgttgcccatgttggtctcgaacacccaggctcaagtgatctacgtggctcagcctcccagagtgttgggattacaagtgtgagccaccgtgcccagcccggaaataaaagcttaatacatgctacaatggggatgaagcttgaggacattatgctcaataagccacacaaaacaacaaagtttgtatggtttcgcttacatgagattcctaaagtcatcaatttcatagagacagaaagtagaatggtgccaggggctaggcgatgggggatgaggagtgagtgtttaataggtttcagtttgggaagatgaaagagttttggagatggttggtggtgattatggcaaaacaatgtgaatataatgccatagaaccacacacttggccagccacttggcagtggctcatgcctgtaatcccagcactttgggaggccaaggtgggcagatcacaaggtcaagagattgagactatcctggccaacatggtgaacccccatctccactaaaaatacaaaaattagttgggcgtggtggcgcatgcctgtaatcccagctactcgggtggctgaggcaggagaatcacttgaacccgggaggaggaggttgcagtgagccgagatcgcgccaccgcgctccagcctggtgacagagtgagactctgtctcaaaaaaaaaaaaaaaaaaaaagagctatacacttaaaaatgtttaaaatgggctgggcatggtgtctcacgtctataatcccaactctttgggaagctgagccaggtggatggcttgagcccaggagtttgagaccagcctgggcaacatggcgaaaccccgtgcctactttaaatatacaaaaaattagcctggcatggtggcgcgcgtgcctgtagtcccaaatactttcgaggctgaggtgggaggagtgtttgagcccaggaagtcaaggctgcagtgagtcgtgattgcaccactgcgctccaggctgggtgatgggagtgaaaccctgtgtccaaaaaaaaaaaaaaaaaaaaaaagtaaagtgataaatttaatgtatattttacaaaaaaaaattctttttaagacagcaggtgtaagaataccagcataaggctgggcacggtgactcatgcctgtaatcccagcactttgggaggctgaggtgggaggttcacttgagtccaagagttggagaccagcttggccaacatggtgaaaccccttctctactgaaaatacaaaaattagccaggcatggtggtggctgcctgtgatcccagctactcgggagtctgaggcaggaggatcgcttgaacctgggaggcagaatttgcaatgagctgagattgcaccattgcactccagcctgggtgacagagtgacactctgtttgaaacaaacaaaaaaagttaaaaaaaaaaaaaaaaaagaataccagcataagctcatagggatcttgggatcagctgaggtcagaatagcaatttcttttgtttcgtgtgtgtgtgtgtgtgtgtgtgtgtgtgtgtgtgtgtgtgtgtgtatgtgtgtgttttagatggagtcttgctctgttgcccaggctggagtgcagtgcagtggtgcaatctcagctcactgcagcctccacctcctgagttcaagtgattctcctgtcagcctcctgagtagctgggattacaggcatgcactaccgttcccggctaatttttgtatttttagggacggggtttcaccatgttagccaggctggtcttgaactcctgacctcaagtgatttgtccaccttggactcccaaagtgctgggattacaggtgtgagccaccatgcccggcccagagtagcaatttcaaagtactcccaggtacaagctggcccgtctcaccaagcctcagtctcctcttgacaatgagactcctgataataaaagccatcacttggctgggacactgatgaggatttattaagtcctaaatgtgaactagtgtcatcatcattgccacctctctgggcatgaaggaaaggactcccactcggctctctattttctctgtgcaacctcaggcatgcgtacagcctctctgaaccttggttcctcctctgaaacttacaaactgcacagtgttgggtgggcgctctggattaggataggctgaccagagcatatgggagtgaagcctgcccttggcatgctggtgatgatgggggacactcctgtgcctcccaggagcagtcgaactgtcccggcgccaccccatcgcgtcctggctgtgcgccatgctgcattgcttcgggagctacatcctggctgatctgctccttggggagccactgatcgattacttcagcaacaactccagcatcctgctggcctcagctgtctggtaagccatgctgggcatgggagagcagagccgggtgggggaaacaacaacctgggcaccagggaggagagaggttggaggaattagaatgcaccagcaacagccctcatgatggccctgaatatgctgccctccatgcccatctctggtctaggcacagcacgttggggagggtggtctgatataaccacagctccctacccccatccttcacagtctgcccatcccctggcactcactgttctctccccaaaaggtacttgattttcttctgccccctggacctcttctacaagtgtgtctgcttcctgcctgtgaaactcatcttcgtggccatgaaggaggtggtgcgagtccgcaagatcgcggtgggcatccatcacgcccatcaccactaccaccacgggtggttcgtcatgattgcaactgggtgggtcaaaggtaaataggatgatgacaatgaaaaatcatcccagtggagaacttttggttcagtggtactaccaggcaccccagctaggaaagccattgctccaggcacaggggcataaagactgcagtaggtgttcaaacctccctacaggtatcagccgatacctttagggtaaatgggaagattcttctagaaatgttactgtcaggggtacctaagacagtgatgatgatgacaaaagccagcattgccagagcaggttttctcacttgcagcactactgacatgtggggctggatcattctttgtggtgggggctgccttgtgcactataggatgttgaacagcacccctggcctccacccacgagatgccagtagcacacttgtccccagctgtgacaaagaaattgtctccagacattgctaaacgcctcctagagggcaaaatggctgcaggtgagaaccccttcttctctagagctctagctataggagttcttaacttttgtggaccatggcccttttgccagtgaagcctacagaccctttcgtgtgcagaaaatagagctagacatggtggctcatgcctgtagttctagctactcaggaggctgaggtgggaggatcacttcagcctaggagttcaacattacagtgagctatgattgtgccactgcactccagctgggcaacagagcaagagtctgtctctaaaaaattaaaattaaaaaataaagtaataatgaaaatgttattagaaataaagaacgttttataatgataaaagggtcaatccaccaggaagatataacaactataaacatatatgcacctagaaacagagcaccaaaatacataaagcaaaaatggacagaagttaggggagaaagagataattcaacattaaaagttggagaagtgggccaaggagtaacaggaaagcagggaaagaaggcctgagcaagtgccaaaaaccattgggcactttatcctcgcttcctgcccaccagatatgggtacccacaaagtgccaagacctagaatcaccctccattgagccatggtgtcctcagttattccttgctatggggagccaacctgtgcattatacaatggtgagccacctccctggcctcgactcactaaataccagtagcgctccctccccagctgtgacaactcaaagtgtttctcaacattgccagatgcttccttgggggcaaaatggccccagatgcgattccctggtccagtagtacatctcaggcacccagttggtgcagcagttcctggagtggatgtccaagtctatttaaccagtacatttagggtaaatgggaagattcttccagaaatttaatcattctatctccatttgagtcttcttattgtctctccaggaagcttttagtactgagcagattccccaggggtatagcatctcctccagaggatgggtggcttgagaaagattaagaacttggagccttgaggaggagagagactgcgggtgggggctgccttggaagcctcatacacagcttggggtcctggattaggggcatcaggacagacaaccccaggttgaagacctgccttgcaggtggggacatgactgattcctttaggtggcttttgctctgaatttgccatatgatcctcagcaaggctctgtcctctctgagcctcagtttccccacctgcagctgatgatcatacacccccaggctcagtgtccttctagagaagattctgggagtggagagactgcttccttgggaattcaaacaagaggaaaggagacctgggggtggtgggcttgttcagaagcaccctgtcctgtaggttctggtgtcgccctcatgtccaactttgagcagctgctccgaggggtctggaagccagagaccaacgagatcctgcacatgtctttgtgagtatcccactccacctctccctccatgcctcctgtatgtccgggtgcctgaccctgagttggatgctgctgataacttagagaggcctcaacccttgactctgcctttcaggagctttcagaggctatgactggggaagctcaaagcagagccatagctctgctcagtgtggaggttggggagggcagagctgcaggaaggaggcaatacctgattggggttttgaagggtgagcaggagttcactggccaagaaggagcctcccaacagaggccagcatctctgccaactgtgaaatcacagaagagcagcagtgctgctgggtgtgcggggtcagggtacagggtatgcatgggatatggagtgtgcattgggagcatatctggagctaagtggacaaggccaggtgacagcatccaagacccaatgcaggatcccacactgcatttagcttaatgttttttatttttttattttttgagacagagtcttgctctgtcgcccaggcttgagtatgctggcatgatctcggctcactgcaacctccacctcccaggttcaagagattctcgtgcctcagcctcctgagtacctgggattacaggcatgtgccaccatgcccggctaatttttgtattttgagtagagatggggtttcaccatgttggtcaggctggtctggaactcctgacctcaagtgatctgccgacctcagcctcccaaaataccgggattacaggcatgagccaccctgccctggacagtttagtgcatttttaaaagaccttgttgggggctgggtgtggtggctcacacctgtaatctctgcactttgggaggccaagcctggaggtttgcttgagtccaggagttcaagacaagactgggcaacatagtgagacctattctatattaaaaaaaaaaagttaaattagctaggcatggtgggatgcacttgtggtcccagctactcaggaggctgaggcaagaggattacttgagcccaggaattcgaggcttcagtaagctaggatcatgccactgtactccagcttgggtggcagagcaagaccttgtctcaaaaaaaaaaaaaaaaaaagggatcatgcatttaaatcacctggccctggaacctggtgagtgctttggaaatattagagagaattatcatcattaggctgggcacggtggctcacgcctgtaatcccagcactttgggaggctgaggtgggcagatcacctgaggtcggcagtttgagaccagcctgaccaacatagagaaaccccatttctgctaaaaatacaaaattagctgggtgtggtggtgcatgcctgtaatcccagctacttgggaggctgaggcaggagaaccacttgaatctgggaggcggaggttgcagtgagccgagatcacgctattgcactccagcctgggcagcaagagcgaaattccatctcaaaaaaaaaaaattaactaggggtggtggcatgcctgtagtcccagctacatgggaggctgaggcaggagaaccggttgaacccgggaggcagaggttgctgtgatccgagatcctgccactgcacttcagcctgggcaatagagcaagactctgtctcaaagaaagaaacagagagagagagagagagaggaaggaaggattattaaatacatgcagtgaagctgggcatggtggcccacccctgtaatcccagctattcaggaagctgaggtagggggattgcttgaaaccaggaattcaagaccagcctgggcaacattacaacatcccatctctaaaaaaaaaaagaaaaaaaaaattagccaggtgtggtggtgtgtgcctgtagtcccagctactcaggacgctgaggcaggaagatcgcttggtctcagaaggttgaagctggagtgagctgtgatcacacaagtgtactccagcctgggcaacagagcgagaccttgtctcaaaaaaaaaaaagcaatgagagacagacatcaggaatagaagtcacaggtctgtcttttgcaacaaataaaaatatcttaaacctattttgcaaggaaaaaaataaaagttaaggaaaactctgcatgttgtaatcacattttctgggggaaataagctgatgggggatccccaagatcatcctgatgttccatgatttgctagaaggactcagagaacttagcaaagccattatattcagggttatgatttattacagtgacaagatatagaataaaatcagcagaggcagctcacacctgtaatcccagcactgtgggaggccgagataggaggattgctcaaggccaggagttcaagaccagcctatgcaatagaacaagactccatctctacaaaaaaaaaaaaaaaacttaaaaattaagcaggcacagtggcacataactctagccctagctacttggggggctgaggtgggagaatcacttgagcctcagagtttgaagttacagtgagccatgatcagaccactgcactccagcctgggtgatagagagagaccctgtctctgtaaataaataaataaataaataaataaataaataaaacgaaatcagcaggggttggctgggcgtggtagctcatgcctgtaatcccagcactttgggaggctgaggcgggtggattatttgaggtcaggagttcaaaaccagcccggccgacatggcgaaaccccatctctagtaaaaatacaaaaatcagctggcgtggtggcgggcatctgtaatcccagctactcgggaggctgaggcaggaaaatcacttgaacccaggaggtggaggttgcagggagctgagatcatgccactgcattccagcctgggtgacagaatgagactctgactcatacacaaacaagaaatcagcaggggcaaaatgtgcatgaggcagagtacaggaaagaaaaggtgaaaatatccagttttcctctcccagtggaatcatgtggacagggcttcattctcccagcagcaatgtgtgacaacatgcatggtgtactgccaaccagggaagctcttctgagcctgggtatccaggatttttattgtggctcagaactagctaaccacctgtgtggctgacctcagtcttcagcccctctagaggtccacctgatgctgcatggcccaagacccccaccataaattacgttgttactacctggtgtggcccaaggccgtcctcaggcaaacaaagacagtcttatcaaggcaggacactccaagggcttagagggcatattccaggagctggacaaaggccagatctttccttggaccaggttaacccatcatgcataggatgacaccatctcaacctgccaccttacaatcaggagaagctgtggctgggcgcagtggctcatgcctataatcccagcactttgggaggccgagcagatcacttgaggccaggagttcgagaccaacctggccaacatggtgaaacactgtctctcctaaaaatacaaaaattagccaggcatggtggcatatgcctgtaatcccagctacttgggaggctgaggtgggagaaacacttgaaacaaggaggtggaggttgcagtgagccgaggttgtgccactgcactccagcctgggcaacagagtgagattccatctcaaaaggaaaagaaaagagagaagctgggatgggagctggtgccagggcaggggggtgtctgggccagagttatgaagacttgagccatgcaggcacctcccggtaatgacagctgctccctccagccccaccaaggccagcctgtatggagccatcctcttcaccctccagcagacccgctggctcccagtgtccaaagccagcctcatcttcatcttcaccttgttcatggtgtcctgtaaggtaagcctttctcttcttgcagcattcttgccttgaccaatgccaccctgccacctccaggttgggagtggggaaattggacactcccagccttatgtggctgggacaggcagcccagagaggggagatgcttgccagtaggtcactgggaagagagtttaaaaggcagtgtccagcagccaggacacagatgagaggaacaggccttctgtgtaaaggacccagcctgagccagggtcaaggtgggcccactctcttgggtacagagaccagagggacaagaagctgaaatggcagcatcaggtacccaggaactcagttggaccaggaatacttctagtctgacagtcatgccttgagttgacatcaccccacccaggaggggtcttcaggggctgggctctctccctctgcatgaagatcttagctcagggctgtgtcttccctgggtgaggactccagggctgtcaaaagggagtgagcatgtcttcctgcattaggcgagaagggagaggcaagcagatggctgggatcctgtcctgctatgtttgtagctctaccccaggccaaatgtcttagtccattcaggctgctgtataacagaatgcagtaccatagactgggtggcttagaaacaacagaaatttattcctgggcaggcacgggggctcatgccaacacttcagggggccaaggcaggcagatcacttgaggccaggagttcaagaccagcctgggcaacatggcgaaaccccatctctcctaaaaatacaaaaattagccaggcgtggggtcacatgcctgtaatcccagctactcgggaggctgaggcaggagaatcgcttgaacccgggaggtggaggttgcagtgagctaagatcgcaccaccgcactccagcctgggcaacaaattgagactctgtctcaaaaacaaacaaacaggcaaacaaaatacaaatacaaaaattaaccaggcgtggtggcgcatgcctgtaatcccagctacttggatggctgaggcatgagaattgcttgaacccaggaggtggaggctgcagtgacctgagatcatgccattgcactccagtttgggcaacagagtgagaccctgtctccaaaaaaaggaaaaggaagaaatgtatttcttacagttctggaggctgggaagtccaagatcagggtactagcctggtcgggttctggtgagggccctctttactggttgcagataggcagcatctcactgtgtcctcgcatggtggaagggactggttagctctcctgggcctctttataagggcactaatgtctttcctgagggctccacccttatgatctaattacccctccaaaggccttacctcctaataccatcacctttgtgataggtttcaacatatgaatttgggaggacacagaccttcagacctgcacttagcacagcttttctctgagcccaggtgtcgtggggaattctgggggatgggtgaccagcagtctcagtgtgcttggaactttccaggggtcaacacttgaaatctggcatcctgggaaacctgagatggtcgcccatcatcctgggggtgcatgcagccagagggctgggtctgggctacctccaaccttgactttgatgacattctctcccctcttctccccaccctgccctccactcctttgctttctaccttggtctccctctgtctctcttgctgtctccctggccaccccacctcaggtgtttctgacagccacccactcacacagctccccctttgatgccctggagggctacatctgccccgtgctgtttggttcggcctgcgggggtgaccatcaccacgacaaccatggtgggtcccacagcggtggtgggccaggagctcagcattcggccatgcccgccaagtccaaggaggagttgagcgagggctccaggaagaagaaggccaagaaggcggattagggggtggcccaaggggcaccggggagaggacccggacccaggaccctctgagctgggaggcttcctgcgctcagatctatcctttcctggccttgacttccccatctgcaaatcagggtcattggctcaccctccagggctgatgtgggggttgagatatggggatgaggatgaagaacttttgtagaaatcggggttccctctttctctctgccaggaccccatagagtcacagcttttggaggggttcacagaatcctggcagcagctccagtcaagaatgtcactggttggcatgatattcttagttgtatttttccttctttaaaattgcatcttgaccaggcacagtggctcatgcctataatcctagcactttgggaggccgaggcgggcagatcacctgaggtcaggagttcaagaccagcttggccaacatggtgaaaccccatctctaccaaaaatacaaaaattagccagacgtggtggtgcacgcctttaatcccagctactcgggaggctgaggcaggagaatcacatgaatccaggaggtggaggttgcagtgagctgagatcttcccactgcactccagcctggccaataagacctgtctccagcaagaccctgtctcaaaaaaaaaaaaaaaaattgcatattgactcctgaagaacttcaagccatgttgagatccattcatttgatggacattttctaagtacctgtgagccaggtgctgccatttcaaagtctcttcttaccacgctcctcagtggctagacattttcacgtggccagaaagtcccgactcttgctgggcgtccctggacaagttgccttcctcctctgagcttggcgctccccatctgtatagtggagacccttggcccccctctgtacggaagggccgatgcgaagctgcagttaaaaaaggctcacatgctcctagcctcgtgcagtcaggaggggagaccaggacagttggaaattatgattgcaaatggctttgcattttagatcattcgtgtgtgtggatcagagaaacgcacaagttccctggcacaaaggaagccctcagtagacacgtctagggcaggcttgagagatcagatggcgtgaaaggcttgtgatctgttcgtctcaggctccccctaaaccaaagaaatggaaacagctggttggggttccacgatccagctctatcaaggggctctgagtgtgcacagttgggacctggatgtatcaggtctccctcaggctggagtccactgtcactcattcagccattgaacaaacatacagatgcttacctgctctgtggtcagccttgtgctgctgctgggcgggccaggagcctgcttcagtgtgagcgaggtggatgatattatagctgaagggtccctcctggtcaccctcatctcagcctaggtcaccaggatgtctgagaggggtgggtgcatgggacgggcgtggccagtctcaggtgaggtttgggcccagacctcgttggagtcccagacgttgccaggctgttggaaaattgccttgttcctgtgatgcctgggagttaggtgggtcctggggaggtttcatcctcttgcttgtccacctcagctcggtgtggaggggcagccaataaatcattgtgaatgaaccctcatggcttgtctgatttatgcctgggattttgttttttgtttttgtttttgtttgagaccgagtctcactcttgcccaggctggagtgcagtggcccgatcttggctccctgcaacctccacctcccgggttcaagcaattctcctgcctcagcctcccgagtagctgggataataggtgcccgccatcacacctggctaatttttgtatttttagtaaaagcggggtttcaccatgttgccatgctggtcttgaactcctgacctcaaatgatccacccaccttggcctcccaaagtgctgggattacaggtgtgagccactgagcccagccacatgcctgggattttggcctcaagatgtggggatggctgggcatggtggctcatccctgtaatctcagcactttggagggctgaagcgggcagatcacctgaggtcaggagttcaagaccagcctggccaacatggtgaaaccctgcctctactaaaactacaaaaattagtcaggtgtggtggcaggtgcctgtaatcccagctactcgggaggctgaagcaggagaatcgcttgaacctgggaggtggaggttgcggtgagctgaggtggagacattgcactccagcctggacaacaagagcaaaactcattctttaaaaaaaaaaaaaaaaaaaaaaggctgggcatggtggctcacacctgtaatcccagcactttgggaggccaaggcaggtggatcacgaggtcggtggatcacgagttcagtagatcaagaccatcctggctaacatggtgaaaccccatctctactaaaaatacaaaaaatcagctggatgtggtggcgggcgcctgtagtcccagctacttgggaggctgaggcaggagaatggcgtgaacctgggaggcagagcttgcagtgagcggagatcgcgccacagcactccagcctggcagacagagcgagactccatctcaaaaaaaaaaaaaatgtatactgtgtacagtatacattacatacattatatgaaatcctagaaaaagcaaactaatgtataattacagaaagctgatcagtgggtgcttggggaaaggcaggtagggtggggtgggcaggagggattttgaaggggcaaggggacatgagtgatgagtctgttaacttctttgattgtgttagtttctcgggtctatacacatgtcagaacctattacattgtacattgcaaatacacacagtacctcatttgtcagtgatgcctcaataaagctgtaaaaaagaacccttcaattataagggaaaaaagtgcgagcttggtggctcacgcctgtaatcccagcactttgggaggctgaggcaggaggatcactggagcccaggagttggtgatcagcctgcacaacatagtgagactctgtctctacaaaaaaaaatttaaaaattagccgggggtggtgactcgtgcctgtaggcccaggcactctggaggttgagtggggaaaatcacttcagcccaggaggttgaggctgcagtgagctaagattgggccactgcacttcagcctgggcggaacagtgagaccctgtctcaaataaataaataaaataagaataaagtagaaaaaaactccacaccaaattgggcaaaagaagctgggcatggtgactcacacctgtagtcctagctactctggagaccaaggcaggaggatcacttgagcccgttaggtggtgtccaacctgggcaacatagcaagaccctgtctcaaaaaaaaactgggcaaaagatttgaatagacaccaccaaagaaattatatggttggcagatatcatataaattgcacattaaaaccacaagcatatgccactgcatacctgttatgaattgaattgggttcctctcaaattcatttgttgaagtcttaacccctaaggtattagggggtgggacccttgggagatgattaggtcatgagggtggggctctcataatgggattagtgcccttacagaagaggccccaaagaaacactttgctcttcctaccatgtgaggacacagagagaagacacgtatgaaccaggaagccggcccttaccacacagtgaatctgccagtatcttgatcatgaacttcccagcctccagaactgtgagaaataaatttccgttgtttataagccaccattttctagtattttcttgtagcaccctaaatggactaagacaggagataaggcctttttttttttttcttttggagatggagtttccctcttgttgcccaggctggagtgcagtggcgccatctcagctcactgcaatccctgcctcccaggttcgatcgattctcctgcctcagcctctgggattacaggcatgtgccaccacgcccagctaattttttgtatttttagtagagacagggtttcaccatgttggccaggctggtctggaactcctgacctcaggtaatccacctgcctcggcctcccaaagtgctgggattacaggggtgagccaccgcacccggcctaatttttttgtagagttggggtctccctatgttacccaggctggtctccagcttctggctcaagtgatcctcttgccttggcctcccaaagtgctgggattacaagcatgagccactgctccccgccaccttttagaatggataaaataaaaataaccgacaatatccagtgtaggtaaggatttgggggcagctggaactcacacactgctggtgggagacaattggacagtttcttttaaggttttttatgtttttaaaatttttaattttttacatttttttttgagacagggtattgctctgtcgcccaagctggaatgcagtggctcaatcttggctcactgtaacctccgcctcctgggttcaagcgatccttccacatcagccccctgagtagctgggactacaggtgcatgccaccatgcctggcaaagttttgtattttttgtagagtcggagtcgtgctctgttgcccacactggccttgaactcttgggctcaagcaatcctcctgcctcagcctcccaaaatgctgggattacaggcgtgagccaccatgcccagtcagatacacatcttcagccatgagaagaatgcaaatcaaaaccacagtgagttgtcacttcacatccaacaaaatggctaaaattaaaatgacaatatggtcattttagtgctggtgaggatgtggagcaataggaactctcatatgctttggtaggaaggtaaaaaggtgcaaccactttggaagacaatttggcaggtttttttataagttaaacatagaagccaggtgcaatcgcttacgtctgtaatcccagcactttgggaggccaaggtgggcagatcacttgagttcaggagttcgagaccagcctggtcaacgttgtgaaaccctgtctctgctacaaatacaaaaaattagccaggcgtggtggtgtgcacctataatcccagctacttgaaggctgaggcgggaggagcccttgaacctgggatggggaggttgcagtgagctgagattgcaccgctgcactccagcctgggtgacagagcaagattctatctccaaaaaaaaaaaaaaaaaaaaaaaaaaaaccaaaacaaaacaaaacaaaaaacaaaatgttagcctggcacagtggctcacccctgtaatcccagcactttgggaggccgaggtgggcagatcacttgagatcaggagtttgagatcagcctgaccaacatggtgaaaccccaacaaggtgtaattttgtaaaaatacaaaaattagccaggcatggtggcacctgcctgtaatcccagctactcaggaggctaagacgggagaatcacttgaacccaggaggcagaggttgcagtgagctgagattgcgccactgcactccagcctgggtgacagagcaagactccgtctcaaaaaaaaaaaaccaacaaaacaaaaacactataagttaaacatagggtggtcatgggtgactcacacctataatcccagggctttgggaggtgcaggacggaggactgttttagcccaggaggttgaggctgcagtgagctgtgatggtgccactgtactgaagcatgggtgacagagcaagactctgtctttaaaaaaacaaaaatgtgaataaatgaacagctgtgctccgcccatagtattgcctactgttcagcgaaaaaaaaaaaaaggcggtggaggtggtgaacatgcaaaaacatgaatgagtctcgaatgtatccagattggtgggaaaaagccatacaaaaaagaatgtgtaatataggcatccatttatctgaaatcctagaaaaagcaaactattgtaacagaaagctgatcagcatgtggttggggaaagaaggacagggtagggcaggtgagaggaattttgcagtggcaccaggaaactcgggtgatggatctgctgatggctttgattgtgctggtttcttgggtctatacccatgtctgaatctattaaattttacttttgggtttttgttttgttttgttttttgagatggagtcttgctctgtcacccaggctggagtgcagtggcacgatcttggctcactgcaacctctgcctcctgggttcaagtgattctcctgcctcagcctcctgagtagctgggattacaggtgcccaccgccatacctggctaatttttgtatttttagcagagacagggtttcaccatgttggccaagcttgtctcaaactcctaacctcaggtgatctgcccgcctcggcttcccaaagtgctgggattacaggcgtgggccaccgtgcctgtgcctggtctaaattttgctttgattacttaagatttaaaaaaaaattaacttttttcttatttatttatttagagagacagagtctcgctctgtcgcccaggctggagggcagtggtgcaatcttggctcactgtaacctctgcctcctgggttcaagcaattctcctgcctcaacctccagagtagctgggattacaggtgcccaccaccacgcctggctaatttttgtatttttagtagagacggttttgccatattggcccggctggtctcgaactccttgcctcaaatgacccacctgcctcagcctcccaaagtgctgggattacaggcttgagccaccacgccggcctcttttttatttatttttaattaattattttttacttctttttttcccactcattcaacctaagtacttaaaagttttcattttatatatgcatagttcatctatcagttatgcctcagtaaagctataaaaaaagaagctttcaattataaggaaaaaaagtctgggcatggtggctcatgcctgtaatccccgcactttgggaggccgaggccaaaggatcacttgagctgaggagttcatgaccagcctggccaacacagtgagacccagtctctgcagaaaaaaaaaaaaaaaaaaattagccagttgtggtgatgtgagcctgtaatcccagctactcaggaggcagaggtgggaggatcgcttgagcccaggagttcgaggctgcaatgagctgagattgcaccactgcactccagcgtggatgacagagtgagaccctgtctcataaataaatgaataggctgcagtaacatactccagacagagtcgcttaagccacagacatttatttttccctaattcttgagggtggaagtttgacatcaaggtgtcagttggttttgtttctcaaggcctctctgcttgggtggcagacggccgccttctctgtcctcgtatagtcttccctcttcgtatgtctgtatcctagtctcctctgcctacgaggacaccagtgaattagatcagggcccacctatagactttttttaaaacttaattatctttttttttttttttgagatggagtctggctttgtggcctaggctggcgtgcagtggcgccatctcggctcactgcaacctccacttcccgggttcaagtgattctcatgcctcagcctcccgagtagctgggattacaggcacgtgccaccatgcctggctaatttttgtatttttagtagagatggagtttcaccacgttggccaggctggtcttaaactcttgatctcaagtgatccacccacctcagcctcccaaagtgctgggattacaggcatgtgagccaccctgcttgactgactattttaacttaattgtctctttaaagaccttatctcaatcagtttggtgctaaaaaaatttaaaaaaaaaagaccttatctcctgttttagtcctttcagtgtgctacaacaaaatactataaactggtggcttgtaaacaacagaaatttatttttcatggttctggaggctgggaagttcaagatcaaaatgctggcagattcactgtctggtaagggctggctatctggttcacagatggtgtcttcttttggtgtccccacatggtagaaagatcaaggagtttcttgggggcctcttgtggaagggcactaatcccattatgagggccacatcctcatgacctaatcacctcccaagggccgcacctcctaataccatcaccttggggctaattttggactcaggtgatcttcctaccttggtctcccaaaacaaagggatgtgagtctctgtgtccagcgtcctttaaggatggattaaattaaagtaactgacaatgcctggtgcaggtaaagatttgggggcagctggagctcgcacactgctggtgggagacaattggacagtttcttttaaatttatttatttatgtatttatttgagatagggtatcactctgtcatccaggctggagtccagtggtgcagtcataggtcacttcagcctcgacctcctgggctcatgtgatcctcccgcctcagccgcttgagtagctgggactacaggcacacatcaccacatccagataatttttgtattttttatatagatgatgtctcgccctgttgcccaggctggtctgaaactcctgggctcaagtgatcctcctgcctcagcctcccaaagtgctgagattacaggtgtgagccaccttgcccagactgatagtttcttattaaattaaacatcacttaccctataaacacaacaatccctgatagtttcttattaaattaaacatcacttaccctataaacacaacagtcccattgtggtgaaacaaaaattcacctattttttttttttttggtaatcaccaaaaactgggaacatcccaaatgtccatcagttggtaagcggatgagccacctggtttatgcatgtgatggaacattacacagcaatgaaaaggagtgaccttctacagcagtgtggttgaatctcaaatgcatttgctaaatgaaagaatccagacccaagagactgtgtgctcccattggcgggacattttatctttagagatggggtattgctttgtcacccaggctggagtgcagtggcaggaacatggatcattacagcctcaaattcccaggctcaagggatcctcccgcctcaccctcctgagtggcagggattgcaggtgcgtgccacatactcggctgtaggtcattttagaaatacaaaattttgggctaggtgcagtggctcacacctgtaatcccagcactttgggaggccgaggtgggtggatcatttgaggtcaggagtttgagaccagcctgaaaccctgcctctactaaaaatacaaaaattagctgggggtggcaggtgcctgtagtcccagctactcaggaggctgaggcaggagaattgcttgaacccaggaggcagaggttgcagtgagctgagatcgtgcaccactgcactccagcctgggtgacagagcgagactccgtctcaaaaaaaaaaaaaagaaaagaaaaggaaagacaaaattttaagtatagaaaacagatcagtggctgccaggagttgagatggaaggagagattatccacaagagagacagaggaattttgggagggaagggactgttctgcatttttaacgtggcagtagttacacaactgtatatgtttgtataaacttgcagaattcgcccggcagcgtagcccttttgggaggctgaggtgggaggatcacctgaggccaggactttgagactagcctgggtatcatggtgaaaccccatttctgcaaaaaatacaaaaattagccgggcatggtggcatgtgcctgtagtcctagctactcaggaggctgatgtgggagaatcacttgagcctgggaggcagaggttgcagtgagccgaaattgcaccactgcactgcagcctgggcaacagagccagacctgtctcaaaacaacaaacaaaaaaacaaacaacaaacaaaacaaaaaacccacaaagaaacactacaaaaaaaaccttgcagaattttgtggctaaattctaccttaatctaaaaagaaaaggaaaaagagagcagcctttggggtttcccaaatctgttcaaatcctgtctttgtttttttttttttttttttttttgacagattctcactctgttgcccaagctggagtgcagtggtgccatcttggctcactgcaacctccgcctctcgggttcaagtgattctcctgccacagcatcccgtgtagctgggattgcaggcaagagccaccatgcctggctaatttttgtatttttagtagagtcagggtttcaacatgttggccagggtggtcttgaacttctgacctcaagtgatcctacccgcctcggtctcccaaagtgctgggattacaggtgttagccaccatgcctggccaaaccctggcttttaatctccgagatacgtagcttgggcaagtaactccccttctctgagcctcaatttcctcttaggatggctaggaggagtgactggaaagtccttggcacaaagtgaggtctggagttgggacaaaagctgcctctgtcaaagtgctcacagaacccctggtcgggttcatttagcatctggtgggtgttggagataagtcggctccctgccttctggcactaatgttctgagatctcattttccaagagaacagattgtaccaaaatagcctcccagcctagtctgcgaagggggtgtgcaagccactggccaggtggagaatgattggcggggcaggctggggctgttgtcccagtgtgggtgtgagaacttggaggatcggctctcaaagtccaggctaatttggctgcaagttacactcagtaacttccttggtcttggaatgagagaaagtttctttttatcctttttaaaaaaaattgtggtaaaatacacaacataaaacttatcatcttttttttgtttgtttgagacagggtcttgctctattgcccaggctgaagtgcagtggcacaatcacagctcactgcagccttgacctcctgggctcaatccatcctcccacctcagcctcccaagtagctgggactacaggtgtgcaccaccatgcctggctaatttttttgtatttttagtagacaccgggtttcaccatgttgcccaggctggtctcaagctcctgagctcaagcaatccacccaccttggcttctcaaagtgctgggattacaggcatgagccaccacacatgtcctaaatttcttagccacatttgagtgtatacttcaggggcattaagtatattcacattggctaggcatggtggcccatgcctgtaatcccagcactttgggaggccaaggcgggtggatcacttgaggtcaggagttcaagaccagcctggccaatatggtgaaaccccatctctactaaaaatacaaaaattagctgggcgcagtggcacgcacttgtaatctcagctactcaggaggctgaggcaggagaatcacttaaacccaggaggcggagtttgcagtgagcccagactgtgccattgtactccagcctgggcaacagagcgagactccatctaaaaaaaaaaaagtatattcacattgttgtgcaaccaccaccattacccagctccagaaatcttttcatcctgcaaaggtacccattaaacactcactccccacttccctcttccagcccttggcagcaccattgtactttgtctctctgaatttgatgactctaggaacctcatataggtacaatcatacaatacaggtgctctccgatttacaaattacaattttcttgagtttacaatgtttcaaaagaggccaggtgcagtggctcacgcctgtaatcccagcacttcgggaggccgaggcgggtggatcacctgaggtcaggagtttgagaccagcctggccaacatggtgaaaccctgtctctgctaaaaatacaaaaaaaattagccaggcatggtggtgggcgcctgtaatcccaggactttgggaggccgaggtgggcggatcacctgaggtcaggagtttgagaccagcctggccaacatggtgaaacctggtctctactaaaaatacaaaaaaatttgccagacgtggtgggcacctgtaatcccagctacttggaaggctgaggcaggagaatcacttgaactggggaggtggaggttgcagtgagccgagactgtgccattgcactctagcctggacgacagagcaagactctgagactctgtctcaaaataaataaataaataaaataaaaataaaaataaacaaaaaataaatgtttcgaaagagattcacattcagtagaaaccatgcttcaagtacccacaccaccattctattttactttcaggacagtatttaataaattacatgagctattcaacactttattacaaaatgggctttgcgttagttgattttgcccaagtgtaggttaatgtaagttttctgaccatgtttaaggacaactaggtgaagctatgatgttcagtaggttaggtgtatggaaatgcctttttttttttttttttttttggagacaggttcttgctctgtcgcccacgctggagtggtgcagtggtgcgatcttggatcactgcaacctctgtctcctgggctcaggtgatccttccactcagactcctgagtagctgggattacaggtgagcaccaccacgctggctaattttttgtatttttagtagagatggggtttcatcatgttgcccaggctgacctcgaatttctggattcaagtgatcctcctgcctcggcctcccaaactgttgggattacaggtgtgagccactgtggtgcaattatcccacactacagcttcaaactcctaagttcaattgatcctcctgcctcagcctcccaagtagctgggactacaggtgtacaccaccacacctggctaatttttaaatgttttgtagagatgaggtcttgctatgttgcccaggctggtcttgaactcctggcctcaagtgatgctcccactttggcctcctaaaatgctgggattacaggtgtgagccaccatgcccagccataagcaggtattttacatataatagatcgtcaaggtggtttgttaccctcattttgtggaaaataaatgaggctgggtgctaaggtgagtggaggtcagtcacctcttactgacagtgggtcagaattgaaatccagtcttggtgcagtagctcacgcctgtaatcccagcactgtgggaggccaaggcaggcagatcacctaagttcaggagttcgagaccagcctggccaacatggcgaaaccccgtctctactaaaatacaaaaaatcacccagacaaggtggcacatgcctgtaatcccagctcctcgggaggctgaagcaggagaattgcttgagcctgggaggcagaggttgcaatgagccgagatcacgccacagcactccagcttgggtgacagaatgagtgaaactccatctcaaaaaaaaaaaaaaaaaaaaaaaagaattgaaatccaggcccatctcattctaaagctatgctttttcttgcacatttcacttctctgattctctttaggaatatgtaagatacatgcatggaacaattcagcattatccttgacactgagcaggcatcagcaaataatacctagagcaggcattagcaaaggcaagttcttatcctgctctcctggttcctagatcatcatccctggtgaccacagacgtgggtggttatgactgcgtttacactgtgctttcctgttagcgcctgcctgaaggcatgtaggaaaactcccagctcaattagtggaggaaattgaggccattgaagccagctgagaggtgaaagtgactgcacaaagacagatgttggcaggcctgagtgtgagctctggttttgcaactaacttgcgtgtgacctttggtgaacccttcttggctgattgaaaatgttgaactaggccggcccggtggctcccaaagtcctgtaattccagcactttgggaggcctaggtgggcagatcacttgaggtcaggagttcaagaccagcctggccaacatggcaaaacctcatctctactaagtacaaaaattagccaggtgtggtggtgggcacctgtaatcccagctactcgggaggctgaggcaggagaattgcttgaacccaggaggcggaggttgcagtgagccgagatcacaccactgcacttcagcctgggcaacacagcgagactctgcctcagttgaaaaaaaaaaaaagaaagaaaaatgttgaaccaggcaggtcaagagtgtgtaaaccatggcccaagggccaaatctggcccctacttgtgtttgtaaataaaattttcttggcacgcagccatgctcatttgtttacttatcgcctatagagatttattattattattattattttcttttttgagacggagtttcgctcttgttgcccaggctggagtacagtggtgtgatctaggctcactataacctccgcctcccaggttcaagtggttcttttgcctcagcctcccaagtagctggggttacgggcacctgccaccacgcccggctaatttttgtagttttagtagagacggggtttcaccatgttgaccaggctggtctcaaactcctgacctcaggtgatctgcccgcctcggcatcccaaagtgctgggattacaggcctgagccactgtgcctggtacctatagtggatcttgtgctacaacagcagagttgagtgatttcaacagaccaccttacctgcacagctgaaaatattcactctctggccctttgcagaaaatgttggccaacccctggactggatgatgctgaagatcccttctaactctaaatatctgaattcatagaggaagtgaacattgcaattaactaggcaaaaaccaagagaaatttatcaaactctgagctgcacaaatgagtatctcaccatcccgcaaatgtccatgtttcctcaacagaaactgaccatggggctgggtgtggtagctcatgcctgtaatcccagcactttgtgaggcagaggaaggaggatcacttgaggccaggagttcggaccagcctggccaacatggcgaaaccccatctctattaaaaatacaaaaattagccaggcatggtggcacgtgcctgtaatcccagctactcgagaggcagaggcacaagaattgcttgaacctgggaggcagaggtcacagtgagctgagatcgtgccactgcactccagcctgagtgagacagtgagactctgtctcaaaacaaacaaaaacaaaacaaaacaaaaacaacaacaacattggtctgaggccaggcatggtggctcacgcctataatcccaacatttagggaggataaggtgggtggattgcttgagccccggagtttttgagaccaacctgggcaatgtagcaagaccccatctttacaaatatgaacaaaaattagtctggcatgctggcgtgtgtctgtggtcccagctaacttgggaggctgaggtgggagggtctcttgagcctgggaggcagaggttgcagtgacctgagattatgccactgcactccagctttggtgtcaacgtgagaccttgtttcaaaagaaaaaaaaaagtctttggtctgtcttacactgggaatggttctactcattcatgcctataacatgcattgatcatttggaaaatattagttcaatgagtgatgcagatgttgtcccattacattattttgtatcaaaaaagtcctcttcattaatatcactattcatctcatcagaaaagtgtgcagccgtgcaatcatagctcactgcagccttgacctcctgggctcaaatgatcctcccacctcagcctccttggtagctgggactgtaggcgcacatgccagcacgccgggataatttttttaaaaaactttttatagagacagggtttcactttgttgcccaggctggtctcaaactcctgacctcaagtgatcttctcgcctcagcttcccaagtagctggggttacaggcttagaaaagtctttaaatgtcaagaagctgccaaactcacagtggtggctacacattttccaaaattctgatttctccttaaaagcttgaattttattgtgggcaacaaaacctgaaattgttttccttgaagtgacagcctcattttgttcatttttgagaaaatgtctgccaagcagccacatctgaatcacagtttgtcagacatttccagtaaaaatggtgttacccgagaaaggccactagcttggctgtggaggcagcaaaccatcattcaatcacgttttctagagatgaccaaggactgaatcctcagcaggggaattttatgtggacctcccgtattgctagtcagaatatgaaaaagacatgccctctcctgttatggggcaaattgtgtcccccccaaaagatatgttgaagccaggctgggcacagtggctcacgcctgtaatcccagaactttgggaggcttggagtgggggggggggggtggatcacaaggtcaggagttcgagaccacactggccaacatgacaaaaccccgtctctactaaaaaaaatacaaaacttagccaggcatggtggcaggcacctgttattcagctacttgggaggctgaggcaggagaattgcttgaacctgggaggtggaagttgcagtgagccgagatcgccccactacactccaacctgggcgacagagtaagactctgtcacaaaaacaaaaacaaaacaaaacaaaaacaaaaaacaacttcctattgggtactgtgttcactatctgggtgacgggatcaatggaagcctaaacctcagcatcatgcaatatattcttatgacaaacctgcacatgtaccccctgaatctaaaataaaaatggaggccgggcgtggtggctcacgcctgtaatcccagcactctgggaggctgaggcaggtgaatcacctgagatcaggagttcgagaccagcctggccaacatggtgaaaccccgtctctactaaaaatacaaaaactagctgggcatggtggcaggcgcctgtagtcccagctactgggaagggaggctgaggcaggattatcgcttgaatctgggaggcagaggttgcagcaagccaagatcatggcattgcactccagcctgggcgacaaaagcaaaactccgtctcgaaaataaataaataaataagtaaaataaaaatggaaatttaaaggaagaaagaaatggtgcttactgtctgtgtcctcacatggcggaatgagagaaagcagctctctgggacactctctcttgttttttgctgtttttgagagagtctcactctgtcccctaggctggagtgcatgagtgagattgtaactcacagaagccttgacttcctgggctcaagtaatcctcccacttcagcctcccaagtagctgggactacaggcgcgcaccacctcgcccagctaatttttgtgttttttggtagagacagggttctgctacattgcccatgttggtcttgacctcctgggctcaagtgatacttccactttggcctcccaaagtgctgggattacaggcatgagccaccgtgcccggcctgaacctgtctattttcacctgatgtgttatcctaggatattttctgcagtgttacacggtgtctgtgaacaatttgataggtagtggccagccacatgtgcccatttacattaacacgaatgacaattacataaaatggaaagccctccttcttggtggaattagcatcctttcaagtacttggtcaccacacgtggctggcggctgctggacagctcccatagggaatattcccatcattacagaaagttctgtcagacagcgcctccctagaaaattcctaatcaacacctaaaaataaaaatgaggtcacaggcaagtcgcagtggctcacgcctgtaatcccagcactttgggaggctgaggcaggcaggtcacttgaggtcaggagtttgagaccagcctggccaacatggcgaaaccccctctctagtaaaaatacaaaaattagccaggcgtggtggtaggcatctgtaatcccagctgctcgggaggctgaggtggaaggatcgcttgaacccaggaagaggaggttacagtgagccaagattgtgccactgtactccatccagcctgggtaacagagtgagacccccatctcaaaaaaaaaaaaaaataggtccctataatacattcatgtgggaaaaaattcagagctatgaaggcgggaggagtgcaaggcaagttggcccccagtacccctccgcagacatccctttttccccttactcaaatatccttttagaaatattctttccagttgggcgggcatggtggctcatgcctgtaatcccagcactttgggaggctgaggcaggaggatcacttgagcccaggagatcaaggctgcaaggtaaaaacgaggtaggtgtgggagctcatgcctgtaatcccaacactttgggaggccaaggcgggaggattggttgaccctaggaattagaaaccagcctggaactgagctgtgatcacgtcaccgcactccagcatgggtgacagaatgagaccctgtctcaaaaaaaaaaaaaaaaaaaaaaagaaactattttcatatgtaaccatgcacctcttttgcatcttgttttttctttctttttcttcttcttctccttctcctccttcttctttttttgtttttgagacggagtctcgttctgtcgcccaggctgaagtgcagtatcgggatcttggcccactgcaagctccgcctcccagattcaagcaatttctcctgcctcagcttcccgagttgggactacaggcacccgccaccatgcctggctaatttttgcatttttaatagaggcgggtttcaccatattggccaggctggtcttgaactcctgcccttgtgatccccccgcctcagcctcccaaagtgctgtgattacaggcatgagccactgtgcctgcctttctttttcttctgcttctttttttttttttttgtgtgtgtgatagactggaatgcagtggtgtgatcacagtttactgcagccttgaactcctgggttcaagcagtccttctgcctcagcctccaaaagtcctgggattacaggtgtgagccattgtgcccggccttttttcttttctttctttcttcttttcactatctattttggaaatttttccttattagtaccacagtggtacctctgaaggatctagggcaagattcttttttttttttgagatgaagtctcgctctgtcgcccaggctggagtgcagtggcacgatctcggctcactgcaagctccacctcccaggttcacgccattctcctggctcagcctcctgagtagctgggactataggcgcccgctaccacgcccggctaattttttgtatttttagtagagacggggtttcactgtgttagccaggatggtctcgatctcctgacctcgtgatccacccgcctcggcctcccaaagtgcggggattacaggcgtgagccaccgcacccggccgattcttttttttgttttttgatacagagtctcactctgtcacccaggctggagtgcagtggcactatcttgggttccactccacctcccgggttcaagtgattctcctgcctcagcctcctgagtagctgggattacaggcataggtccctaccacctggctaatttttgtatctttaatagaggaggggttttaccctgttggccaggttggtctcaaactcctgatctcaggtgatccgcccacctcggcctcccaaagtgctaggattacaggcgtaaaccaccctgcccagccaagaccccatctctattttaaaaaatacaaaaattagccgagtgtggtggcacatacctgtagtcccaactactcaggaggctgcggcaggaggattgcttgagcccaggacgtcaagggtgcagtgagccatgatcacgccgctgcactgtgaatgtgcccttatttagagataggatctttgcagatttaactaaattaaggaatttgagatgagatcattatagattgtctagatgggccctaaatccaatgaaaatgtggaattttgagagagcaagaccatgtctcaaaaaaaaaaaaaaaaaaagggccaggcagggtggtataatctcagcactttgggaggccgaggcgggcggataatctgaggttggaggttcaagaccagcatgaccaacagggagaaaccctgtctctactaaaaatacaacagtagccgggtgtggtagcgcatgcctgtaatcccagctccttgggaggctgaggcaggagaatcgcttgaacccgggaggcggaggttgcagtgagccaagatcgcaccattgcactccagcctgggcaacaagagcaaaactccgtctcaaaaaaaaaaaaaaaaaaaggaaataggatctttgcagatgcaaagatgtaattaagataaggttatattggtttagggtgggccctcctctcacccacaaccctccaaaagtaaactatgaacagtcctttttgttatgcacatataaacacatatacagaggccaggctcggtggctcatgcctgtaatcccagcacttttggaggccgaggcaggcggatcacttgagatcaggagtttgagaccaacctgaccaacatggtgaaaccctgtctctactgaaaatacaacaattagctgggcgttggggaaagagttcgtttgtttggacaacacgcttcctttggcactttgctcttatattgatgggacataaacatttttttgtggcaatgctctgaagatctaattcatttatttcaatgcctgcaggtaattccattgatggggcataatttatttatccaatctcctattgatgtcatttatttatattattactaaatttctgaaatttacatttcagaaatttacaaaatttcttttcttttcttttttagatggagtctagctctgtcacccaggcggaagtgcagtggtgtgatctcagttcactgcaacctccacctcccaggcttaagggattctcctgcctcagcgttctaagtagctgggatcacaggtgtccaccaccacgcctggctaaattttttgtatttttagtagcgatggggttgcaccacgttggccaggctggtctggaactcctgacctcaggtgatccacccaccttggcctcccaaagtgctgggattacaggtgtgagctactgtgcccagtaacatttacaaactttctttctttctttcttttgttttttgagatggagtttcactcttgttgcccaggctggagtgcagtggcgtgatctcggctcactgcaacctctgcctcccaggttcaagcaattctcctgcctcaacctcctgagtagctgggattacaggcacgtgccaccacacccagctaattttttgtatttttttagtagagacggggtttcaccatgttggccaggctggtctcgaactcctggccttagatgatcctcctgcctgcttccccgctcacaggcgtgagccaccacgccaagccccaaaatttctaatttttgatattatgattgatgctgggatgttgggttctggaaccagactacctgagtccaaatcacacctcagccatttacaagttatctattgctgtgtaacaggtgttcaccaaaacttagccacttaacaaatatttattatctcatggttttcgtgtgagagaaattcaggagcttagctgggtggtttaggctcgggatctctcctgaggttaccatcagatgtcagccagagccaggcgcagtggctcatgcctgtaatcccagcactttgggaggctaaggcaggcgggtcacctgaagttaggagttcaagactagcctggccaacatggtgaaacctcatctctactaaaaatatataaattagccgggtgtggtggtgtgcatctgtaatcccaggtacttgggaggccaaggcaggggaatcacttgaacctgggaggcggagattgcagtgagccgagattgcaccattgcactccagcctggatgatacagagaaactgtctcaaaaaaaaaaaaaaaaaaaaaaatgtcagccagggctgcaactatctgaagacttgactggggctggaggatccacttccaaaacgtcacccttagctggcgtttggctggaggtctcagttccttaccacatgggcttttgcacaagctgcttgaattttatcatgacatgacacctaacttccccagagcaagcaatccaagaaagcaaagaagacctagtaccatttctgatctggtctgagtcaaacaccatcacattgctttattcaagtcactaagtccagcccagagtcaaggagaagccaattaggtgttattctcttttctttctttctttctttctttcttttttctttctttccttctttcttcctttctttttctttctttctttcttttttctttctttctttccttctttctttctttctttttctttctttctctctctctttctttctctatttttctttttccttccttccttctctttctccctttccctcccctcccctcccttcccctccccttctcttcccttcctttcctttttttgagacagagtcttgttctgttgcccaggctggagtgcagtggcgtgatcttggctcactgcaacctctgcctccaggtttcaagtgattctcctgcctcagcctcccaagtatctgtgattacaggcaaatcttggctcactgcaacctctgcctcacagattcaagcaattcccctgtctcagcctcctgagtagctgggactacaggtgtgcaccaccacgcccagctaagttttgtatttttagtagagacagggtttcaccatgttggccaggatggtctcaatctctcgacctcgtgatccgcctaccttggcctaccaaagtgctgggattacaggcgtgagccactgcacccggctagttttttgtatttttagtagagacagggtttcatcatgttggccaggctggtctcgaactcctgacctcaggtgatctgcctgctgcagcctctcaaagtgctgggattacagacgtgagccaccgcgcccagctgatacttagtttcttacatggttgaatctcagagtatttggctgacttgaggcctcttagcttgggcatcattggctgctagaaaatccaaggaccggaattagaggttccgtgcatcctgtaagagtgtaggcaaaattgtgtgcacgtgttatttggtaggaggaggtccaaagcttttattgagggtctcatgtagtctgtgatcccaagaagaatatggctcactgtgcaaaagtgagacctcctgttgtatttgttcccaatgttttctttctttcttttttcttttcttttttttttttttgagacagagtcttgcactgtcgcccaggcaggtgtgcagtggcacgatctcggctcgctgcaacctccacctcccaggttcaagcaattctcctgtctcagcctcctgagtagctaggattataggcgcccgccactgcgcccagctaattttttgtatttttagtagagacggggtttcactatgttggccaggctggtcttgaactcctgacctcatgatccactcgcctcagcctcccaaagtgctgggattacaagcgtgagccaccacacccggcctgtacctgatattttctgatgacaatcttcttccactggagcattggatcttcaatactgaggcacatcttctccctatacaacatacagataaaaaggaagttgaaatcagagagaaataaaaagacattttatattttattccgcttcattttcatttcctttttttttttttttttttaagctggagtctcggtctgtcacccaggctggagtgcagtggtgtgatctcgactcactgaaacctctgcctcccaggctcaagcgattctcgtgcctcagcctcctgagtagctgagattacaggtgcatgccaatacacccggctaatttttgtagttttagtagagacagggtttcaccgtgttggtcaggctgttctcgaactcctgacctcaggtgatccacccacctctgcctcccaaagtgctgggatttcaggcatgagccaccgcgcccagccctgctccattcccttcactgcataccttaataattccttttcggtaatcaggcacattttgaacttttatgaatagatctgtgattattctaagttcttaaattgttctgcagtcttttatgtttattatcataggcatagatggacctatattccttaccatgtcctttattattcaaccagtgtatcctctggttttttgcctatgttattaagtaacctattatctctggagttcatgaagttataatatcatttttattaaactgaatagaatggtatagcaatgacctcttaattacaatttgatttgactgcaaaactttttcctcctctataaggagatgatgtctgctttaagctgtaatgttttgccatgttgcaaaaagccacaataataaattaagtataaaaaaatacctgtcttagggctgagtgtagtggctcgtgcctatcctggctacttgagaggctgaggtaggaggatcacttgagccaagaagttcgaggctgcagtgaactgtaattgtgccattaaactgcagcctggtgatggagggagacctggtctctaaataagtaaattaacaaatagaccagactgagtggctcatgcccgtaatcccagaactttgggaagctgaggtgggaggatcccttcaggccaggagttccagaccagcgtggacaacatagtgagatcccacctcctcaaaaaatttaaaaattagtcaggtgtggtggtgtgcacctgtagtgccagctagtatggaggctgaggcaggaggatcacttgaccccaggaagcagtgagctgtgttcacgctgctgcagtcaagcatgggtgacagaaggagagcctgtgtcaaaaaaattaaaataaataaataaatcttgatattttattcattgtgtagtttctgcattaattttaatttttttttctttgagacgcagtctcgctctgtcgcccaggctggagtccagtgacatgatcttggctcactgcaagctctgccttccaggttcacgtcattctcctgcctcagcctcctgagtagctggaactacaggtgcctgccaccacacctggctaatttttttttttttttgtatttttagtacagatggggtttcgccttgttagccaggatggtctcaatctgctggcctcatgatctccccgccttggcctcccaaagtgctgggattacaggcgtgagccaccgtgcccggcccagtaattttaattttttaaaataatcactaggtgcagtggctcacgcctgtagtcccagcactttgggaggccggggtaggaagatcgcttaaggccaggagttcaagaccagcctggacaacatatcgagatccccatctctacgaaaaaaaaaaataaaaataaaaaaaataaaaaaattagccaggcaggtggcgtgcacctgcagtcctaactactctggaggctgaggtgggaaggttgcttgagcccaagagttcaaggttgcagtgaacaaggctatgctactgcactccagcctgggtgacagagtgagaccctgtctctaaaaatagtaataatttaaaaaaatgtatttaaggccgagtgtggtggatcatgcctgtaatcccagcactttgggaggctgaggcgggtggatcacttcaagtcaggagttcgagaccagcctgagcaacatggtgaaaccccgtctctactataaaaaaaaacaaaaaacaaacaaacaacaacaaaaaaaaacaaaattagccaggtgtggtggcgggtgcccataataccagctactcgggaagctgacgcaggagcatcgcttgaacccgggaggcggagtttgcagtgagcccagattgcgccattgcactccagcctgggcaacaagagccaaactccgtctcaaaaaaaaaaaaaaaagtatttaaatattatgtattatttggacacaataaaaaaattggaaaaaatattctttatctttgttgcttttttctctttttaccgctctcccccaatgttgctccctgtccagcgcctctccgcagcctctcctctgactctgccctgggttcaagctgcttctggtcattcgcgtgatggcctcgagggggcgctgcttccccactcatgctcagccaggactccttagtcagtttaattgggtttgttaacatcttccagcttagattcctcttctgcaaagtgggtattataatgttagccacgcagggatgacgaaggaagtgcagttgacccttgaacaacacgagtttgaactgtacggatgtactcaggcgtggatttttttccacccctgccacccctgagacagcaagaccaagccctccttctgttcttcctccttctccttctccttagcctgctcaaggtgaagacgacaaggatgaacacttttgtgatgatccacttccacttcatccatagtaaatatgttttctcttcctttgaagtttggacgggcacagtggctcactcctgtaatcccagcactttagaggccaagacgggtggatcacctgaggccaggagttcaagaccagcctagccaacatggcaaaaccctgcctctactaaaaatacaaaaattagccaggcgtggtggtgggcgcctgtaatcccagctactcagaggctgaggcaggagaatcgcttgaacccaggaggcagaggttgcagtgagttgaggtcatgccactgcactccagcctgggcaacagagtgagactccatctcaaataatgaaacaaacaaacaaaaaacaaaacaaaaacaaaacaccagaatttttttagtgacatttgcttttctctagcttacttattgcaagaatacagtatataatacatagaatgtagaaaatcagtgttcatcgaccatttatgtcatcaataaggcttttggtcaatagtaggtgttacatgcagtcaaaagttacatgcagatttttgactgtaggggtgagcttggcactcctaacccctgtgttggttctaaggttgactacacagaaatcccctagccctgggctcgtggttactcaatgcataaggataatcacgatttttttttttttttttaaaacagggtcttgctctgtcacccaggctggagtgcagtggtgcagtcatagctcactgcagcctcaacctcttgggctcaagtgatcctcccacctcagcctgcccagtagctgggactacaggcatgcaccaccaagtctggtgaatttttattttttgtagatatgggatctcactatattgtccaggctggtctcgaactcctgggctcaagcaatccacctgcctcagcctcccaaaatgctgggattacaggcgtcagccaacattcccagccactatttttttttttttttgagacagtcttgctctgtcccccaggctggagtgcagtggtgtgatctcagctcactgcaacttccgcctcctgggttcgagcaattctcctgcttctgcctcccaagtagctgggattacaggcatgcaccaccacgcctggctaatttttttttttttttgtatttttagtagagatgggatttcaccatgttggccaggctggtctcaaactctgggcctcaagtgatcatcccgcctgggcctcccaaagtgctgggagtgtgcccggccccagccactattttttaagagtacaaaattgaagcatattctgatagggaatttaaaacactcactaaagtaggcagaatagtataatgaaccgcagcccaccctaaccaccatcaccccctactcaacctcgccaaccccgcccccatcccatttgccttcctgtcaggtattattttgaagcaaatctcagctatcttatcattccataaatattttgttatatgtctctaaaacatacacactcttttttttttttttttgagacagggtctcactctgttgcccaagctggagcacagtggcgtgatcacgactcattgcagcctcaacttcccaggttcaagtgatccttccacctcagagtagcagggaccactggcacatgcaccatgtctagttaattttttaattttttgtaaaaatggagtctcaatatgttggccagtctggtcttgaactcctgagcttaagtgatcctcctgccttggcctcccaaactgctgggataacaggcatgaggcactgcacctggcccagactctttaaaagcctaaccagtctgggcatggtggctcatgcctgtaatcccagcactttgggaggccgaggcgggtgcatcacctgaggtcaggagttccagaccagcctggacaacatggtgaaaccccgtctctactaaaaatacaaaatattagccaggtgtggtggcaggtgcctctaatcccagctactcgggagggtgagacaggagaattgcttgaacgtgggaggcggaggttgcagtaagccaagatcatgccattgcactccagcctggatgacaagagcaaaactgtctcgaaaacaaaaacaaaaataaaaacaaaaacctcaccgcaataccattgtcacactgcaaaaactttgccaataattttttaatatctgtagattccagtttagccaataactgtggagttttggaatcatatccgaatttggctgttagctcacttccttgccaaggaaacttgggaaattgtttaacttctttgaagcctattttctttcttcttctttttttttttaaacgcagtctcactttgtcacccaggctggagtgcaatggcgtgatctcggctcactgcaacctccgccttccgggttcatgcgattctcctgcctcagcctctcgagtagctgggattacaggtgctcaccaccacgcccagctaatttttgtatttttagtagagacagggtttcatcacgttggtctggaagcctgttttcatcatcaatgaactgggatagtaaattgaagcccccagattgcttggagtattggagacagtatgtttcctaaaatttcagcccctaaaacttcttttcttttctttttctttttttgttttaaagagacagggttttgctctgttgcccaggctagagtgcagtgaggcaatcatatctcactgcagccttgactttctgggctcaagtaatcctcccacctcaacctcccgagtagttgggactacaggcacacaccaccacgcccagctaattttttgttattgttgttgttgtagagatgagggtctcactatgttgcccaggctggtcttgaactcctggccttgagtgatcctcccaccttggcttccccagtagctgggactacaggagcatgccactgtgcctggcagcacctgaaacttcttttttttttttttttgtgagatggagtgtagtgtggctctgtcgtccaggctggagtgcaatggcgtaatctctgctcactgcaacctctgcctcccaggtttaagtgatcctcctgcctcagcctcccaagtagctgggattacaggcacctgccaccatgcctggctaatttttgtttttagtagagatggggtctcaccatattggccaagctggtctcaaattcctgacctcaggtgatttgcccacctcggcctcccaaagtgctgggattacaggcatgagccaccgcgcctgaccaagtatctgaaacttctatccctgaaaatatagtaacactattattattactttttctttgagatggaggcttgctctgtcgcccaggctggagtgcagtggcgcaatctcggctcactgcaagctccacctcccaggttcatgccattctcctgcctcagcttcctgagtagctgggactacaggtgcaaaccaccacgcccagctaattttttgttttttgttttttgttttttatgtagagacagggtttcaccatgttagccaggatggtcttgatctcctgacctcgtgatctgcctgccttggcctcccaaagtgctgggattactggcgtgagccaccatgcctgggtgacttgtgagtttttgagacaaagtctcgctctgtcacccaggctggagtgcagtggtgcgatctcggctcactgcaagctccacctcccgggttcatgccattctcctgcctcagcttcctgagtagctgggactacaggtgcaaaccaccacgcccagctaattttttgttttgttttgttttgttttttttgtagagacggggtttcaccgtgttagccaggatggtcttgatctcctgacctcgtgatctgcctgccttggcctcccaaagtgctgggattactagcgtgagccaccatgcccgggtgatttgtgagtttttgagacaaagtcttgctctgtcgcccaggctgcagtgcagtggcaggatctcggctcattgcaacctccaactcccaggttcaaacaattcttgtgcctcagcctcccaagtagctgggattacaggcatgcgtcaccacgcccagctaatttttctatttttagtagagataggggtctcaccatattggccagtctggtcttgaatgcctgacctcaggtgatccgcctgcctcggcctcccaaagtgctgggattacaggcatgagccaccgtgcccggtcttggagttttaatggtaattaatcatggctaacatctcacgggcccttcctgtgatgtaggtgtagtgttagtctcactctctatataaatgcttttcattgtctcaccaacacaggaagttagtgagaaaattcaagtgcagagtagtgaagcgtcacaggcaagggacttcacctttctgcatcttgttttcttcatctgtgaaacaggatcataatgtctgtctcttggggtaataatgtggactgctaatgccaaatgccaaccaactgcacctcctagactgtcagcaaatggcatcttttacgaggagccgtatcagcctggcacacaatagttaaccactaagtctgggctgaatgcccggctaagctggtgccctagtgcaaacaatcgctttcattatcccagttgctgggagaattgggcaaggagagacccataaaatacctaagacgaaagttactaggatagccaggggcttgtcttccgggtggcgccgaggccaggaaactgtcctctctaacctatttccccagaggagtctaaattggtcgttcaactaccagcaaaggctaaagagaggctggagcccccaggacagccagaacgctgacactgcaaagggcctctgtccttactggggaagcccagtcctgctcagctgtcttcttcagcaacaaacagaagtccagaaagagaaacagttgtggaggaagctgttgtgatgataatttactgagcacctactatgtgccaggcacgccagccttaccagacaagatccttgggctcatggaattcactttctcgtgggacagacaaacaataacatgtagaaacatatcagctgttggtgagtaccatgcagaaaattaaaataaggcgatggcattgggagtgacttaaggggtcactacgcaatgggatggtcagagacagcctctcaggaggaggtagcattgaagctaaaatgtgaacaacatgaacagatgcagcatagagcactaaagtacaggacgtgcaaaggccctgaggttgaaataagctaaatgcattagactagggggttctcgagtaaggggaattctgccccctaggggacattgcaatgtctagggagacttttttttttttgagacggagtctcgctctgtcactaggctggagtgcagtggcgtgatctcagttactgcaagctctgcctcccaggttcacaccattctcctgcctcagcctcctgagtagctgggactacaggtgtccgccacatgcccggctaattttttgtatttttagtagagacggggtttcaccgtgttagccaggatggtctcgatctcctgacctcatgatctgccctcctcggcttcccaaagtgctgggattacaggcgtgagccaccgcacctggccgagactttttctttttgagatggagccttgctctgttgcccaggctggagcgcagtggcacgatctcggctcactgcaacctctgcttcccgggttcaagcgattctcctgcctcaggcttccgagtagctgggattacaggtacatgccaccgcgccagctaatttttgtatttttagtagagatggggtttcgccatgttggccaggctggtctcgaactcctggcctcaagtaatctgcctgttttggcctctcaaagtgctgggattagaggtgtgagccactgcacccagcctagggatactttttaattgtgacgactttggtggtggtggtgggggtgtgctgttgaaatctagtgggtgggggccggaaatgctttgcaacatcctaaaatgcatgggacaattgccaccacagaggatgatctggcctcaaatgtttgtcatactgagatggaggaagtctgggagagagactaggaaaaagcctagaggtgaaaggcaaggtcaaagactcttatcctcctgcgatcatcagcaggcagtaaccaagggagcgtggccaggcgctgaagtgaattcgggtccaaggagcctgctgggacccaggaaaacgagagaaggaacagaaattgtggtggaggcaaattcaagatcagaagattggggaggaggtgctaagagaggtctggagagatgctgggacccagaactggggcctcagtgagatcagcaggctgcagctaaactgtggtatccaggtgagttgtgggaaggtggctggggggccgggctgggtttatgggggcggggtccgtggaggagagggggtctgacccgcactcgctccctgactctgcccttctagctggtgagaaagttctcactctaagctgcagttttctcatctgttgaatggtgacgctcaactctatttactgggcctttactgctgagaaaataattaactctggctgcccgtggtggctcatgcctctaatcccagcactttgggaggctgaggcaggaggatggcttgaggccaagagttcaagaacagcctgagcaacacagtgagactcccgtccctacaaaaaataaaaaacttaagcctagcatggtggcacatgcctatagttccagctacttgagacgccgaggcaggaggatggtttgagtccaggagttcaaggctgcagtgagctatgatcatgtcactgcactctaatctgggcaatggagtgagaccctgtctcttgaaaaaaacaacaacaacaacaacaactaaaaaactagctaggcatggtggtgtgtgcctgttaatcccagctactcaggaggctgaggtgggaggatcacttgaggacaggagatggaggctgcagtgagccacaatagtgccactgcactccagcctgggcgacagagcaagacttgactttttttttttttgagacggtcttgctctgtcacccaggatggagtgcaatggtgcgatctcagctcactgcaatgtccgtttcctgggttcaaacaattctcctgcctcagcctccctgagtagctgggattacaggcatgaaccatcacgcccagctaattttgtatttttagtagaggcggggtttctccatgttggccaggctggtctcaaactcctgacctcaggcgatccgcccaccttggcctcccaaagtgctgggattacagatgtgagccactgtgcctggccgaccctcactcttaaaaaagaattaactcagcaggcctgagttgtccataccccacacattaaagctgtagctcttgacctgctcctgggaagtgacctctaagcccttggaatgggataagggtgtctttgtttacctggagagccttggctcacactagatactaacaacatgacttagagagggagctttaagtcacgtgatattggttgacctctggaggggctggggattaaggtcagctatgctggtggtcaatcatgtctacgtgaccaactcccaataaaaaccccggacaccaaggctcaggagagctttcctagttggtggcaaactgttcatgttgtcacacatcactgctgggagatttaagtgctggccatacaacttcactgggaggggacgactgaaatctcacacctggtctcttctggaccctgccttggatgcctcttcctgtgcctgatcttattttattttttgaggcagagtctctctctgttgcccagtggtggctcactgcagcctcaacctcctgcgctcaagtgattctcccatctcagcctcccaagtagctaggaccgcagacacgaatcaccatgtccagctgatttttttgctgttgttgagatagggtctcgctctgttgtccaggctggggtacagtgttgcgatcttggctcactgcaacttctgcctcccaggctcaagtggtcctctcacctcagccttgtgaatagctgggactacaggtgtgcaccaccacatctggctaatttttaaattttttgtagaaatggggtttcaccatgttgcccaggctggtcttgaacccttggactcccaaagtgctgggattacaggcgtgagccaccaagtctggccctggataatttttttattttgtagagacactgtctccctgtgttgcccaggctggtcttgaactcctgggctcaagcaatccccacctcagcctctcaaagtgccgagattacaggcatgagccactgtgcctggccccttggctgattttaatttatatccattcatcataacctatgagtacctattttacagctttttctgttttgttttgttttgttttgttttgttttgttttgttttgagatggactgtccctctgttgccaaggctgggtgtggtgtgatctcagctcactgcaacctctacctccttggttcaagcgattctcgtgtctgagccccccacgtagctgggattacagacgtgcaccgtcatgcccggctaatttttgtatttttagtagagacggggtttcaccatgttggccgcgctggtctccgactcctaacctcaagtgatcggcccgccttggcctcccaaagtcctgggattacaggcgtgagccatctcgcctgggctatgacaccatttttaaattctctgagtcctaaggaatcatggagcttgagggtgctcttggggaatccctcaatggcagagtctgtcctgggtggacaaggcagggaagggaagtcaaggcagagaggatagtaagagcaaagacacaaaggtttgaaaatacagttgacccagtagaatcaatatcactgttttgttgagagctcactaatgctgggcattttatagacctatctcccaaccgccttgttgatgttttgttcaaggtggatattttcggcattaattttgatctgctaacacattgcactacctcatatattgctgcagagacaagcgccctgaatggctcttactttcatttcacagaccatgcggccgatgccctgggagggagaccacttgcttaagtcctccaggagggcgatggaggagccggcattccaaccaggctcacggatgccaaggtatacgcgtgttctctctgcctccagcggtggtttgctactgttgtgaagaggttgggcaggattcaggtcgccagggcattttcaataatgtcagatcatggctggacgtggggcctcacacctgtaatatcagcactttgggaggctcaggtgggaggatcgtttgttggcaggagcctgccaagttccagccttgaactcaacccagtgagaccccatttctacaaaaaaaatatttttttttgagacgaagtttcgctcctattgcccaggctggagtgtaatggcgccatcttggctcatgcaacctctgcctcccaggttcgagtaattctcctgcctcagcctcccaagtagctgggactacaggcatgtgacaccatacccagctaattttttgtatttttagtagagatggggtttcaccatgttggccaggctggtctggaactcctgacctcaggtggtccacccacctcgacctcccaaagtgctgggattacaggcgtgagccactatgcctagccaaaaatttttatttattttttatttttttattttttgagacggggtctcactctgtcgcccaggctggagtgcagtggtatgatcttggctcactgcaacctctctgcctcccaggttcacgcaattcccatgcctcagcctctcgaatagctgggactacaggcgtgcaccaccatggccagctaatttttgtatttttagtagaagcaaggttggccaggctgatcctagactcctaggctcaaatgattcgcctgtcttggactcccaaagtgctgggattataggcatgatccactgggcccagactctacacaaatttttttttttttaattaaccagacgtgatggtgcacacctgtagtcccagctacttgggaggctgagatgggaggatcacttgagcccaggagatcgaggctacagtgagctatgatcacaccactgcactccagcctgggtggcagagcaagactctgtatcacctaacaacaaacctcctgcaggcaaagataactagctagagtttatttatttatttaattttattgttcatttatttatttatttatttttgagatggagtctccctctgtcactcaggctggaatgcagtggcatgattttggctcacttcaacctccgcctcccaggttcaagcgatgcttccgcctcagcctcccaagtagctgggactacaggggctcaggaccatgcctggcttatttctgtatttttagtagagatggggtttcaccatgttggccaggctggtcttgaactcatgacctcaagtgatccatctaccttggcctcccaaagcggtgggattacaggcacgtgattgtagctcacagcagccttgaactcttgggctcatgcaatcctcccatctcagcctcccaagtagctgggacaacaggcaggcaccatcatgccatagctacattgttttttttttgtttgtttttttttgctttttttttagacagagtttcattcttgttgcccaggctggagtgcagtggcacgatcttggctcactgcaacctctgcctcccaggttcaagtgattctcctgcctcagcctccggagtagctaggattacaggcatgcaccaccaaacccggctaattttgtatttttagaagagacagggtttctccacattggtcaggctggtctcgaactcttgacctcaggtgatctgcccacctcggcctcccaaagtgctgggattacaggcgtgagccacagctcctggcccatggctctatttttaaaaaacttttttttgcagagatgagggctcactgtgttgccctggctggccttgaactgctggctcaagagatcctcctgccctggcctctggaatagctgggattactggaacaagccattgtgctcagctactagaattgattttaaactgttttctttctttttttcttttttcttttgagatggtgtcttgctgtgtcaccaggctggagtgcagtggtgtgatcttagttcactgcaacctccacctcctgagttcaagcgattctcctgcctcagcctcccaagtagctgggattacaggcctgcgccaccacacctggctaatttttgtatttttcatagagacagggtttcaccatgttggccaggctggtttgaactcctaacctcaagtgatccacccacctcggcctcccaaagtgctgggattataggtgtgagccactgcacctggcctaaaactggtttctcagtttttcaacactgctgacaactgggaacagatcattctttgtgggggcttcctgggcattgttagatgttgagcagcatccctggtctccacccacgtgatgccagtagcatcctccagtcgtggcaactggaaaggtctccagacattgcaagtgtcccctgggggctgaatggtccccaagtgagaactgctggttgaaatagtatgtgcggtgcctggacgtggaaggactttgcctcgtgggagggggtgggaagggcagaatggggtgggactttcgtcaagcggttgtctttcttgtctgggctgtggggctgggcatggctcccagcctctcctctgcacacctgggctcaggctcaacttacacgggtaggccccaggggacccaggtgttcaagaggttggctggtccccgggccccaatgcccagcactgggaaaccatagttgctatggtgactactgcgctctgaggacgaggagctgggaagaggactcccgtgcctagaggagccaacatccagaggtcttggcggggaggccactgtctaatatccctccatgagtgcttgcagaccaaggaaagcagtggagaggagctggttcagctccccagaggcactggaggtggtgggggctgcaggtcactgggggagcctcggaaggtgaaactggctccccgttcctgatggccctgcccggctggcctaccaggaaggctgcctggctgctggcgtgaggtctctgagccccacgccctttccaggggaagggtcatcttggtgggtgggcggcaatgagcgtgggccctctcagcccgagtacccgccggcggcttctgcggggtgaagccggccccctcccagcacctccacccagcggtgtgaccatcttcatcagttccacagtctcaggtaaggtgcagggtatggatgggggctcagaggcaggttggcacgctcaggcggtgtcagggcaatgggcacagctcatggagtcctttaagagacctagacgtgaaccaagtactgtgtttcacgcctgtaatcccagcactttgggaggctgaggcgggtggatcacttgaggtcaagagttgaagaccaacctgggcaacatggcgaaaccctgtctctactaaaaatacaaaaaattagctgggcgtagtggtgggtgcctgtaatcccagctacttgagaggctgaggcaggagaatccctgaacctgggaggcagaggttgcagtgagccaagatcgcgccatagcactccagcctgagcaacagagcaagactctgtctcaagaaacaaaataaaccaaaaactcaaaaaggagatattagataatagcatgcagctacacagcactgcctaactccacattcagtgaagtcagttggcaacttgatattaaccagggtggagcatttaaaccacggaaattggcagaaaatacaaatcggatttaaaaaaatttgttttggagaacagagtattatggaacatttgctgggtcactgctctttttttttttttttttttctgagatggagtctcactctgtcgcccaggctggagtgcagtggtgcgatctggactcactattacctctgtctcccaggttcaagggattctcctgcctcagcctcctgagcagctgagattacagccacctgccaccatgtctgactaatttttgtatttttagtagagatggggtttcaccatgctgaccaggctggtgtcaaactcctgacctcaggtcatctgccccactcagcctcccaaagtgctgggattacaggcgtgagccaccatgcctggccacaccactccatgtatatgtgctctcatagaaattacatcctggttcggggaatggacacataaattaagtaattgcaggccgggtgcagtggctcacacctgtaatcccagcactttgggaggccgaggcgggcgaatcacgaggtcaggagattgagaccatcctggctaacacagtgaaaccctgtctctactaaaaatacaaaaaattagctaggcgtggtggcgggcgcctgtagccccagctgctcgggaggctgaggcaagagaatggcgtgaacccaggaggcggagcttgcagcgagccgagatcatgccactgcactccagcctgggcaacagagcatgactccatctcaaaaaaaaaaaaaaaaaaaaataagtaattgcagcttgtgggccaggtgtggtggttcacacctgcaatcccagcacattgggaggccgaggtgggagaattgggaaacctctatgatgtgaatgcagctcaggtagtgactcatgtgggagcctcctggaccctctgtttcctcctcgagaagccagactgagaacccaacttgatagagttgctgtgagtggcatacgatgttacaactaatatttatgaccaatgtactgtgtgtcaggcttaaaaactgccagaaccttgccacagctgcatggccctgtgtgaccggaccctgctcacctccccaaccttatctcatgtggtcactcccttgtctacctgtcatatccacaccagaatccatagatccgggaacccacaaggccctggggcccatatcaggactatcactctcacggttccctcttctccttcttattctgatcctttgggtctcagtgcaaacaccccgtcttcagggagcccttctctgcccctcgatgtaaagtagatttgtccctctgaagtgggcagattgcttgagctcaggagttcaagaccagcctgagcaacatggcgaggccccatctttacaaaaagtaaaaaaaaaaaaaaaataggctgggtgcagtggctcacacctgtaatcccggtactttagggggccgaggcacctgaggtgaggagtttgagaccagcgtggccaacatggtgaaaccccgtctctactaaaaatacaaaaattagcccagtgtggtggtgtgcgcctgtaatcccagctactcaggaggctgaggcaggagaatcccttgaatctggtaggcggaggttgcagtgagccgagattgtgccactgcattcaagcctgggcacagagcgagactctgtctcaaaaaataaaaaaagagaaaagaaaagaaagagagagagaaggaaggaaggaaggaaggaaggaaagaaggaaaagaaagaaagatttgtccctgttattctctagcccagcccacccgtgtgttttcaatagcactcttcacaaactgcaagtactttttaaaactatttatgggccgggcgcagtggctcacgcctgtgatcccagcactttgggaggccgaggtgggcagatcacaaggtcaggagattgaaaccatcctggccaacatgatgaaaccccatctctactaaaacacaaaaaattagccaggtgtggtggtgcacgcctgtaatcccagctacttgggaggctgaggcaggggaattgcttgaacccaggaggcagaggttgcagtgagctgagatcacgccactgcactccagcctggtgacagagtaagacttcgtctcaaaaaacaaactaacaaaaaaacaaaaaaaaaacccaaaatctatttatgtatttatttattgtgccccttggttaagcataaggggtacaatggcaaacaagatataatccactggtcacagtggctcactcctgtaatcccagtgctttgagaggccaaagcaattggattgcttgagcctaggagtctgaggccagcctagaaaacatagtgagactccttctctacaaaaaatttaaaaaaatatatatggctgtggtggtgcccctctataatcccagctactcaggaggctgaggtgggaggattgactgatgctaggagtttgaggttacagtgagctatgattgcaccactgccctccagcctgggtgatggagtgagacctgtcccttaaaaaacatttttttaaaaatatatacagggctgggtatggtggctcatgtctgtaatcccaacactttgggaggctgaggtgggaagatggcttgagtccaggagttcaagaccagcctaggaaacataaggagactccacaaaataaataaaataactgcctattgcgattttttttatttttctttctttctttttttttttttttttgagatggtggcagcagatgaggctttagccgcaggccaggcgcagtggctcacgcctgtaatcccaacactttgggaggcagaggagagagaatctcttgaggccaggaactcgagaccagcctgggcaacatagcgagatcccattctccacaaaaaaggggaaaaaagacaaaagtaaatcaataaaataaaagcagagctatgaggctgggaagagttctgagtcctttccactaataccctccatgcccttccttgcagatatggatgcagagagggaagccctgcagagcactgcctaccctgaagtgccagaccttctgccagaggcacggcttgatgtttgaggtaactggaagtcactccgggctccatgctttttttatttttttttgacacgtagttcttgctctgtcgccaggctggagtgcagtggtgcgatctcggctcactgcaacctctgcctcccgggttcaagcgattctcctgcctcagcctcctgagtagctgggactacaggcgtgcgccaccacgcccagctaatttttgtatttttagtagagacggggtttcaccatgttggccaggatggtcttgatctcttgaccttgtgatctgcccgcctcggcctcccaaaatgctgggattacaggcgtgagccactgagcccagccccatgcttttttttttttgagacagagtctcgctctgccacccaggctggagtgcaatggtgcaatctcagctcactgcaaccttggcctccagggttcaagcgattctctcgcctcagcctcctgagtagctgggattacaggtgcccgccaccacgcccctctatccatactcttttaatgctttactgttgagttttaaaattcacagtgatttttaaacaaaggtcccacatgttctttttgcaccgagccccgtagattctgtagttggtcctggagatctggccctggagataaaaatccttgggactataaaaaggcaggtgggactgggcgcggtggctgacacctgtaatcccagcactttgggaggcaaaggcgggcagatcgcttgaggtcagaaactcgagactagcctaggcaacatgatgaaactctgtctctactaaaaatataaaaattagccgggcgtggtggctcatgcctgtagtcccagctactcaggaggctgaggcaggagaatcgccagaacttgggaagcagagattgcagtgagctgagatcaagccactgtactccagcctgggtgacagagtgagactccgtctcaaaaaaaaaaaaaaaaaaggcagatggaggggttacagccatgtgcaccgtgcttggttagcatggcaggtggtgtagaaaagtgagtaggagtgaatgcttttgaacacagattcatcgctgtgtcccttgcagtgtgaccttggacatgtcatttaactgtctgttgttgttgctgctgtttttgtcttgccttcagagcttcctggccctcttcgtactgggcttcaggaggagtataagagggctttgcgatatgggggatgggcatggaggttggacatgcctttttctagaacgctgatggtgtacctgtttggcacagtcccaaaacagtaggagcccctaatgctgtctccttgtaccaatccctggctagggaatttttttttttttttcagatgaggtccagtggatgacagagcaagacttcatctcaaaaaaaaaaaaaaagaaaaagtgaaaaagtgcagtggtgtgatctcacagctcactgcaaccttgagcttctgggctcaagggatcctcctgtctcagccttctgaggagctgaaactacagacatgcagcgctatccctggctaaccggggatgtttctgcctgcacatttccctgtggaaactgatgaacatctttggagtctcagcttaacttgagggctgcctccttgctgcttatgagaatgattcattgcaccaaagtcccatttggttaaaagatgaggccgggcacagtggctaacacctgtattcccagtgctttgggaggccaaggcaggaggattgctggaggccaggagtttgataccggtctgggtaatataacaagatcccgtctctataaaattaaaaaaatgagctgggtgtggtgacgcccacctgtagtcccagctactggggaggctgaggtgggaggatcacttgaacccaggagtttgaggctgcagtgagctgtgatggagccactgcactctagcctgggtgccagattgggatgctgtctttaaaaaaaaaaaaatctgggccgggcgaagtggctcatgcctgtaatcccagcactttgggaggccaaggcgggtagatcacctgaggccaggagttcgagaccagcctggccaacatggtgaaaccccctctctactaaaaatacaaaaattacccagatgtggtgacacgcacctgtaatcccagctactcgggaggctggggcaggagaattgcttgaacctgggaggtggtggttgcagtgagccgagataacgccactgcactccagcctaggcaacagaatgagattctgtctcaaaaaaaaaaaaaaaatcaagtggctctttgggtaaaaaagaaaagaaaaggaaaaagatgcatgatcgttatggtttgtatatttattactaagaaagaagcagtgctggaaattccactctgcccaccattgatcatgagacatagttcaatgtcaaaggcactatggaagcatcagcactgagagctgatgaaatggtcaagcttttctgtttaatgcccatgcccgtcctctgacgcggatgctgtcaacatcctccacacgcacatcgggagacggcggtccctccagaagcacaagctccttccagaggctggctcctgaccccttttcctttcctgctcctctaactcattgttcctccccctttcttcctccagtcacattgagtactgctggcctctcaccacttgtcttaagaatctatgtgtctttctctcggtgctaaagaattcagggaggcagggactgttccgagttgtctttgtctccctgtcaccccagccttccacagggtcagctttgcctacctgaactgagctgttctgcccagcctccccatggcgagcaggcacaaatgaactgcaagcgtgcggttgccaaggagaccttggtacgtccagtgctggccaaactaaacaccctcctttgcaaggaaagctttgtgaacaagtgtggacacgtccttgctttcaaagcaacagtttgaaaatggccaagttccttttttaaaaaagcttttctgtcagggcgaggtggctcatgcctgtaatcccagcactctgggaggccgagacaggcagatcacgaggtcaggagattgagaccatcctggctaacacggtgaaaccccatctctactaaaaaatgcaaaaaattagccgggcatgtagtcccagctactccggaggctgaggcaggagaatggcgtgaacccgggaggcggagcttgcagtgagccaagattgcgccactgcactccagcctgggtgatagagcaagactccatctcaaaaaaaaaaaaaagattttctttctttttttttttcttttttctttttctgtttttcttgcaacagggtgtcgctctgtcacccaggctggagtgcaggcatgcaatcacagctcactgcagctttctgggctcaggtgatcctcctgtctcagcctctcaagtatctgagactacaggcacacaccactacacctggctatttatttatttatttatttatttatttattgtagacacaatgtctccctatattgttcaggctggtctcaaactcccggcctcaagagatcctcctccctcagcctcccatagtgctgggattataggggtaagccactttgccctgcctctgttctaatttttttattttaattaacttgcttttttatttcttaatttttatttttttagagatgaggtcttgctacattgcccaacctggtcttgaactcctgggttcaagcaatcctcatgcttcagcctccagagtagctgggattataggcacatgccaccgtgcccgactaaatgtttataaataaacttctgaatttggaatttaggcttacaggaaacgcatggacagtacggagttcccatacaccccacactctgtgtctcctaacgttttacctaaccacagcacaaccaactatgttgttacaactatgaaatgaactttgaggacaggtgcagtagctcgtgcctgtaatcctaacattttgggaggctgaggcagacagttcacttgagatcaggagtttgagaccagcctggccaacatagcaaaactttatctctaataaagatacaaaaaaattagccaggcgtggtggtgcacgcctgtaatcccagctactcgggaggctgaggcaggagaattgcttgaactcgggaggcggaggttgtggtgagctgagagtgcaccactaagctccagcctgggtgacagagcaagactctgtccccctgaccaaaaaaaaaaagaaagaaagaaagaaagaaatcagtctgggggcagtggctcatgcctgtaatcccagcattttgggaagccgaggtgggtggatcacctgaggtcaagagttcgagaccagcctggccaatatggtgaaaccttatctctactaaaaatacaaaaaattagccaggcatggtggtgtgcgcctgtagttccagctactcaggagactgaggcataagaatcgcttgaacccattaggcaaaatttacaatgagccaagatcatgccactggaaggaaggaaggaaggaaggaaggaaggaaggaaagaaggaaggaaggaaggaaggaaggaaggaaggaaggaggaaggaaggaaggaaggaaggaaggaaggattttccagtgagacaagattgcgccactgcactctagcctgggtgacatagcaggactccaactcaaaaaaaaaaaaaaagataaatcaacattggtacatgactgttaacctcctgactttattcaaatgttgccagctcttctatctaagtcttttctggtgaagaaccccatccagggtaccccattgcatttcgttgtcttattgccctagtctcctctggtctgtgtcaatttctcagtcaccttatttctcatgaccttggcagtctttttctttccttctttccttctttccttccttccttctttccttccttccttcctaccttcctctctctctttcttttgacagagcctggctctgctgtccaggctggcatgcagtagtacaataagagctcactgcaacctctgccttgtgggctcaattgatcctcctacctcagcctcccgagtagctgggactacaggtgcccaccaccatgcttggctttgactggcagggcatcttgaagaacgcccttccctctagtctgggtctgtctgttatttttctcatgattatactgaggttatgaatttggttcaagttcttttaatccagacatccccctacaggaagaggctgtcaaaaatttttgaaagaaactttctgctttgtcaaaagggattgaaaaaacaaatcacctgtcatgccacctctctgacaaacttgtgtttctatttcccaggtcgttgatctgaggtggggtattcggaacattgaagccactgaccacttgaccacagaactctgcttggaggaggttgaccggtgttggaaaacatccatagggccagcttttgttgtgagtgtcttgggaggaatgggttagctcttactcctccaggatatgccccctgctttctagacaaactgatcagcagagggaagtaggtaccgtttctgctttcgtaccttatccctatggcctgcctgtggcagacattactaatcaatcacagaactctttctgcagagctgaatgggatccagacattagcagtcaaatggaagcagcaggtggcttggagagtagaatgttgaagccagaaggaatcttggaatttgatctggactttctcccaccttccccaccccctccactttatgtctatagaactttgggatcctggaaagccatggaaaaggtggaaacccacagggtcttgggatattttttttcctccatgtgcccactggtttcaggtcgtggggacttctcccctctctcttccaattgcaccccttctatcaaaaaatcaatctccagtccacaattaatggttttggctattaaaattgaatgatattcctgagtcttttttctttttcttttttgagacagagtctcaaaaaagcccaggctagagtgcagtggcaagatcatggctcactacagccttgaactcctgggcttctgatctccctgccttgttctcccaagtagctgggactacaggtgtgtgccgccacagttggctagtatttttttggaaatatggggtctcactatgttgcccaggctggtcttgaactcctaggcacaagtgatcctcccaccttggcctcccaaagttctgggattacaggcataagccaatgcacctggtctagttttaagtttttttttttttttgagatgggtcttgctatgttgcccaggctggcctgagtcctaatttattacatcgagttccagatacatccaagaacgatcacattttccttagaaattctagagcagggggccgggcgtggtggctcacacctgtaatcccagcactttgggaggccaaggtgggtggatcatgaagtcaggagattgagaccagcctgggcaacatagtgaagtcccatatctactaaaaaattagctgggcatggtggcacgtgcctgtaatcccagctacttgggaggctgaggcaggagaattgcttgaacctgggaggcagaggttgcagtgagccgagatcatgccactgtactccagcctgggcgacagagcaagactctatctcgaaaagaaaagaaaagaaaagaaaagaaaagaaaagaaaagaaaagaaattctagagcagaggccaacaagctatagcctgaaaggcaagtgtggcctgctgcctgtctttgtaagtaaagctttattggcacacagccatgtccacttgtttacacattgtttagccctgctttcaagctataatggcagagtttagtcgttctgacagagaccatctggcctgtaaagccaaaagtattgactgtctgactttttccaggagaaatgtgctgatccctgtcctggacagtaaagagggaaaaagtaaagaaaagtaccatggccaggtatggtggctcactcctgtaatctctgcattttgggaggctgaggcaggtggacaatttgaggtcaggagtttgagagcagcctgggcaacatggtgaaaccccatctctactaaaaatacacaaattagccagacgtggtggcacatgcctgtgatcccagctacttgggaagctgaggcaggataatcatttgaaactgggaggcagaggttggagtgagccgagattgtgccactgcattccagactgcgcaacagacggagactctgtcaaaaaaaaaaaaaaaaaaggagaaggtgagggccagagagatattctattttctgagatctattttctgagacctaaagtgtcccaacattataacgaaagactgtaacaagggctttgggaattatgagccaggaataatgggcaaaacatatatatataatctatatataatatatatattatatatatataatataatgatatataatatataatatataataacatataacatactattatatgtataatatataatgtatacattatatattatatataatacattatctataatatataatacattatatattatatatatatatatttcactcctttttctttgagacaaggtcttgctatgttgcccaggctggttttgaactcccggactgaagcaatcctccagccttagcctcctgggtagctgggattacagttattcttttgatctacacttctattgtaatttggtgccactctgttttatttattactgctttaaaatatatcctaatgtttggaaaactctacattctgttgtaaatctcctaaatttccagtctcctaagtttaatttttcaaaggagcccaatgatcattttaatgagtttccaagaaaaaaaaaaaggagagagaggctgaccatggtggctcatgcctgtaatcccgcacttcaggaggctgagatgagaggatcacttgagcccaggagttcaagaccagcttgagtaacatagtgagaccctatctctaccaaaaaaaaaaaaaaaaaaaaaaaaaattatttttttaaggaagaaagggaaaagaagggagacaaagaactccaggaggaatctgattttgcaacccaaattgcaggcagccaaaagcacagtgcagctttctgattgcacagagaacctaggggtgatctctgagcttctctggggcctgaccaaccggccctgggaccttccagaaaggccctatggccagctgagctggacttccttcctgcttccatcttgaaccaggcatcacccctctactgcccaagagccacagcatcattctgctccatgactctgatttgtgggggcgccttccacaaaaatcagagatgtgctggaggcccttggagaggtgtctctctggtaaataagtcattaggcagcaccgaggccggggacagctccccatggcacttccttttagagaggctcctgtctcttgggctatcagcagccccagtgtctccagagctctgagagttgttcctggtgggaactgttcctatttcccttgctctgatcccacagattggagcagtttgttttgttttgttttttaccacctgtttccttcatataacctctggtctgtggttggcttgtgtcttagtctattttctgttgcttataacagaatccctgaaactgactagttataaagagatgaggctggccaccttggatcacacttgtaatcccagcgctttgagaggctaaagccggaggatcgtgtgatcccaggagttcaagaccagcctgggcaacgtaacaaggccccatctctaaaaaaaaaaaaagaacagttagctggggtggtggctcatgcttgtagtcctagctgctccggaggctgagatgggaaaatcccttgagcccagaagtctgaggtggcagtgaactatgattgtaccgtggcactctggcctgggtgccagaggaagagtctgtctcttaagaaaaaaagaagaaaaaagaatagaaaagaaattattattattattattttgagatggagtctcactctgtcacccaggctggggtgcagtgggaacatgttggctcactgcaacctccatctcctgggttcaagcaattctcctgcctcagcctcctgagtagctgggattacaggtgcccactaccacacctggctaatttttttatatttttagtagagacagggtttcgccatgttggccaggctgctcttgaactcctgacctcaggtgatccacccacctcggcctccaaaagtgctgggattacaggcgtgagccactgcgcccagacttctattttttttttttttttttttttgagatggagttgctccgttacccaggctaactcctaagctcaagtgatctgcccaccctattctcccaaagtgctgggattacaggtgtgagccaccgcactggcccaggttaactcttttggattccggtttgcacctactccaagtgtggttctggcattaagaccaaaattttatggcctcccatgccctacagaatcttgtgcaggggggccgggtgcagtggcttacgcctgtaatccaagcactttgagaggccgaggcaggcggatcacttgaggtcaggaattcaagaccagcctggccaacatggcgaaaccctgtctctactaaaaatacaaaaaattagccagctgtggtcgtgggtgcctataatcccagctacttgggaggctgaggcaggagaatcacttgaatctgggaggcagaggttgcagtgagccaagattgcactattacactccagcctgggtaacaagagtgaaactctgactcaagaaaagaaaagggggaggggacagccttatcccccttcgctgtccctcttcttgccagtgccttagtcgctgtgcccttcctacagcagccatgcttcttcctgccacagggcctttgcacatgctgctccccctgcctgcaagatactctgcctaataaactccttttcatgtttttggtttttttgttttgttttgtttttgtgtttttttttttttttttgagacagtcttactctgtcgcccaggctggagtgcagtggcaccatgtcggttcactgaaacctccctctcctgggttcaagcaattctccttcctcagcctcccaagtagctgggattacaggcacctaccaccatgcccggctaattatttttatatttttaatagatatggggtttcgctatgttggccaggctggtctcgaactcctgacctcaggtgatccacctgcctcggcctcccaaagtgctgggattacaggcatgagctaccatgcctggctcttttcatgtcttattctgcagctcaggtgaatttccctgactccccaggctacgtacgacccatgttttaccctttcttcctagcactctaacagctgccatttgaccttggtctgattctagattgatgcctgcctctttggctaagactccaaggttggctgggcccggtggctcctgcctgtaatcccagaacgttgggaggctgaggtgggcagattatttgaggtcaggagtttgagaccagtctggccaacatggtgaaacccagtctctactaaaaatacaaaaattagccgggtgtggtggtgggcgcctgtagtcccagctactggggaggtagaggttgcagtgagctgagattgtaccactgcacgccagcctgggtgacagagtgaaactgtgtctcaaaaaaagtaaataggccaggcgcagtggctcatgcctgtaatcccaacactttgggaggctgaagcaggcggatcacctgagatcaagaattcgagaccagcctggccaacatggcgaaaccctgtctctactaaaaatataaaaattagccaggcgtggtggctcacgcctgtaatcccagctactcaggaggctgaggccggagaatcacttgaactcaggaggcagaggttgcagtgatctgagattgtgccactgcactccagcctgggcgacagagggagattccatctcaaaaaaataaaataaataataaataaataaatatctgtgggctgactgtactcagaatgtggcgctttcatactgagctctgatctctccctttctccgtggtcagcccttaagccatcctgtgaccttggactaactctgttccatccccaggcccctgtttccatgataataaaaggggagagctggacttagggtcctcttagccctgcttcacctctgattctccctggaaggaccagaactagaatggagaaccaccacaagatttaatttaaatcttaattatcgagataaattgtatatatattttgagacggagtttcgctcttgttgcccaggctggagtgcaatggcgcaatctcggctcaccacaacctccgcctccagggttcaagcgattctcttgcctcaggctcccgagcagctgggactacaggcatgtgccaccatgcctggctatttttaaaaaaattttttgtagagacagggtctcactatgttgcctattattattattattattattattattattattattattattttatttgagacagagtcttgctctgtcgcccaggctggagtgtagtggtgccatcttggctcactgcaaccttcgcctcccggcttcaagcaagtctcctgcctcagcctccctagtagctgggattacacctgcacgccaccatgcctggctaatttttgtatttttagtaggggtttcaccatgttggccagactggtctcgaactcctcttgacctcaaatgatctgcccacctcagccttccaaagtgttgagattacaggcgtgagccaccttgcctggccccattatttgtttctttagagacagggtctcactctgtcccccaggctggagtgcagtggtgcgatcacagctcactgcagcctcgaactcctgagctcaagcggtcctccagcctcagcctcctgagtacctgagactacagatgcacacccccacaccctgataatttttaatttttatagatatggggtctcactatgttgcccagctagtctctaactcctgggctcaagagatcctcctgccttggcctcccaaagtgttgggattacaggcgtgagccaccatgcctagcctaggggacaattctttattgaccctcgtgacttctggtggctccaggctataagggcggtcaacttcacctccatcttctcagagtgctggttggattgaagaattgaattgacataaaattgattaacaggaaaagaaaccatacatatttatttatttatttattagtttgtttatttatttatttattttgagacagagtcttactctgttgcccaggctggactgcggtggcaccatgtcggttcactgaaacctccctctcccgggttcaagcaattctcctgcctcagcctcccaagtagctgggattacaggcacctaccactacgcccagctaatttttatatttttagtagatatgggatttcactatgttggccaggccagtcttgaactcctgacctcaggtaatccacccgccttggcctcccaaagtgctgggattacaggtgtgagccaccgcgcctggccgatatacatttattaatacaagtgttttacatggcataagaaccctcataaggaaataaggacccacaaaagcagctagagtcatttacttatatattgaattggagaaagaatagtaaattgtggctggggacagtggctcacgacagtaatcccagcactttgtgaggctgagatgagaggatcccttgagtacaggagttcaataccagcccgggtaatgtagtgagaccctatctgtaccgaaaataaaaacttaaaaattagctgggtatggtggcatgtgattgtggtccaagtgggaggatcacttaaacccaggaggttgaggctgcagtgagccatggttgtaccaccgcactccagcctgggcgacagagcaagaccttgtctgaagaaaaaaagtgagatttgaatctgtgacttcctctctgccaggccctcatcggtgatcagtacggcccctgtctgattccctcgcggatcgatgagaaggagtgggaggtattgagggaccatctgactgccaggccaagtgacctggagctggtggcacgatacttccagagggacgagaatgcgtttcctcccacctacgtcctgcaggcaccaggtactggggaggcctgtgaaccagaggaggccaccttaacttctgtcctacgctctggagcccaggaggcccggaggctggggctcatcacccaggagcagtggcagcactaccaccggtcaggtgaggccgcagggactcccctctggagacccacaagaaactgaccacgtgttcagaatatccatcccctgttggcaaaaatgcaacagtctgcatttcttgcaaatgccaaaccagtcaacctctggtccctcggctctgagaaaggctgttttactgatccaagatagttcagccatgttcctgatcaatcttggtctcaggatcttcctctcctcgctggctctttcttcttgtctcccagggaggttcctggcacaggggccgtattagtctgttctcatgccactaataaaggcatacttgaggctgggtaatttacaaaggaaagaggtttaatggactcacaattccacatggctggggaggcctcacaatcatggctgaaggcaaaggagaagcaaagaggcacatcttacatggtggcaggtaagacagagtgagagccaagcgaaaggggaaattccttataaaaccatcagatcttgtgagacttattcactaccacgagaacagtatgggggaaactatcccccatgattcaattatctcccaccaggtccctcccacagcacgtgtgaattatgggagctacaattcaagatgagatttgggtgaagacacagccaaaccatatcagggggagcaatgcagggcgactaccatcccagtttgcctgggacggaggggttcctaggatgcaggatttgtattactaaaatctgacaggctgagcccagtagtgcctacctgtaatcccagaattttggaaggccgaggcaggagaatcacttgagttcaggagttcgagaccagcctgggcaatatagtgacacctcatctctacaaaaaaaaaaaaaaacttttaaaaatttgccaaatgtggtagtgcatgcctgtagtcccagccactcaggaggctgaggcaggaggattgcttgagcccaggaggcagaggctgtggtaagccaagatcatgccactgcactccagccggggttacagagagagacctgtctcaaaaaacaaaaacaaaaacaaaaacaaaattagctaggtatagtggtgcatgcctgtagccccagctactcaggaggctgagatgagaggatcgctggagcccgggagttggaggctgcattgagctatgatcttgccactgcactccagcatgggtgacagagtgagaccctgtctctaaataaataaattaattaattaaataaaatacagtctacccttgaacaacatagtgtttagggactctaactccttgcacagtcgaaaatctgtgtataacttttgactcccccaaaacgtaactactaatagcccaccaatcacataaattgttgaccaggtgtggtggctcatgcctgtaatcccagcactttgggagtctgaggtgggtggattacttgagccccgagttggagaccagtctgggcaacatggcaaaacctcacctttatttaaaaaaaaaaaattaaaattagttgggtgtggtggtgcacacctgtagtctcagctactcaggagagtgacgtgggaggattgcgtcagcctaggaggcggagattgcagtgaaccaagattgtaccactgtacttcagtctgggtgacagagtgagaccccgtatcaaacaaacaaacaaagaaacaacataaacagttggccgggtgcggtggctcatgcctgtaatcccagcactttggaaggctgaggcagacggatcacgaggtcaggagttcaagaccagcctggccaaaatagtgaaactctgtctctactaaaattacaaaaattagctgggcatggtggtgcacacctgtagtcccagctactcgggaggctgaggcaggagaatcacttgaacccgggaggcagcggttgtagtgagctgagatcgcaccactgcactccagcctggcagcagagcaagactctgtctaaaaacaaaaaacaaaaaacaacaaaaaaaaacagtcgatgaacacatattttgcatgttctatctatcatatcctgttttcttacaatcaagtaagctagagaaaagaaaatgttattacaaaaatcacaaggaagagaaaatatgtttgctgttgattaaacataagtggatcatcagtcacaaaggtcttcatcctcatcatcttcaccttgagtaggaagaggaggggttggtcttgctgtctcaggggtggcagaggcagaagaaacttgacctgtgtagttcaagcccatgttcttcaatggccaacactgtgtcatgtaacttccacctctgtctagttccaagatattttctttttctttctttttttttttttttgagatggagtcttgctctattgtccaggctggagtgtagtggtgcgatctcagctcactccaacctctgcttcccaggttcaagcaattctcctgcctcagcctcctaagttgctgggattacaggcatgcgccacctcgcctggctaatttttgtatttttagtagagacggggtttccccatgttgctcaggctggtctcgaactcctgacctcttgatcggcccgccttggcctcccaaagtgctgggattacaggtatgagcacccgcgcctggctgacattttctttttatttatttatttatttatttatttatttatttatttaattttttttgagacaaggtcttactctgttgcccaggctggagtgcagtggcacgatcacggctcagtgtggcctccagctcctggggtcaagcaatcctcccacctcagccttcccagtagctgggaccgcagtcacacgccatcacaggtggctaacttattttttgtagagacggggttttgccgttttgcacaggctggtctcgaactcctgagctcaagtgatcgtccagcctctgcctcccaaagtgctgagattacaggcatgaactacacctggccctccaagacattttcatcacctcaaaagaagctctacccattaaacactccccatctcccctctcccagcgcaggcaaccatcaatctgctttctgtctctattaatttgcctgttctggacatttcatgtcaatggaatctcacactacatggccttttgtgtctggcttctctcacttggcatcatatttttgaggttcatccacattttaacacctgtgagtacttcatccatttcaatggccgaatagtatcccattgtgtggaaggaccatattttgtttatccattcatctgttgatggatgtttgttttgatttgttttgtttttgagatggagtctcgctctgttgcacaggctgaagtgcagtgacatgatcttggctcactgcaacctttgcctcccgggttcaagtgattctcctgtcttagcctcttgagtagttgggattacaggcgtgcggcatcacgctgggctaatttttgtatttttagtagtgacaaggtttcaccatgttggccaggctggtctcaaactcctgacttcaggtgatctgcccaccttggcctcccaaagtgctgggattacaggcatgagaccccatgtccagcccgttgatggatgtttggattgtttctgtcttttggctattgtgaatggtgctgttacaagctagggtgtattaatatttgttggagtctctgttttcaggtattttcagcagatacctgggagtggaattgctgggcgtgatagtaactccatgtttcactttttgaggatgacagcattgttttacagtgtgactgctcctcacatgggacctctgtgttgcctaccctgaggggtctttgattaataatggctaaatcaggccgggcgcagtggctcacgcctgtaatcccagcactttgggaggccgaggttgaattgcttgagctcagtagttggagaccagcttgggcaacatagtaagaccccatctctacaaaaaatacaaaaattagccaggcgtgctagtgcatgcctgtaatcccagctactcgggaggctgaggtggaaggatcgcttgagcctaggaggcggaggttgcagtgagctaagatcgcgccactccactccagcctgggtgacagagtgagaccctgtctcaataataataataataagaagaagaataagagtaatggcttaactagtgtaactctgggtgcagtccctggaccagcaagccttggcttgttgcaaatgcaaactccggggccccactcagatctgctgaatcacttctggaggtggggtccagccatgtgggtcttttcgagacccccaggtcagactctggtgcacgttaatcttgagaaccaatgcacatcccccaacaacaggtctcccagcaaccccatttaggtcagctgctgacccaataatgaccacacttccttcccaccttccccactttggcagtcattgagtgggagatagagcggagcctgctgagctcagaggaccgggaacagggagccaccgtcttccttagagagatccaagacctccacaaacacatccttgaagactgcgcccttaggatggtggaccggctcgcggatggctgcctggacgctgatgcccagaaccttctcagcagcctcaaaagtcacatcactgacatgcacccaggggtcctcaagacccaccgcctgccgtggagccgcgacttggtgaaccccaagaacaagactcacgcctgctacctgaaggagctgggtgagcagtttgtggtgagggccaatcaccaggtcctcacacgcctccgtgagctggatacggccggacaggagttggcgtggctctaccaagagatccgccaccacctttggcagagctcggaggtcattcagaccttctgcggacgccaggaactcctggcccggcttgggcagcagctcaggcacgatgacagcaagcagcacacccccctggtactctttgggcccccaggcattggaaagacagccctgatgtgcaagctggctgagcagatgccaaggctgctggggcacaagacagtgaccgtcctgcggctgctggggacgtcacaaatgagctcagatgcccgtggcctgctgaagagcatctgcttccaggtgtgcctggcctatgggctgcccttgccccctgcccaggttctggacgcccacaccagggtggtccagtttttccataccctcctccacactgtctcttgcagaaacttcgagtctctcgtgctcctgctggatgctatggatgacctggactctgtccgccatgctcggagggttccctggctgcctctcaactgccccccgagggtgcacctcatcctctcagcttgctcgggggcactgggggttttggacaccttgcagcgggtgctcctggacccggaggcctactgggaggtgaagcccctttccggaaaccaaggccagcagatgatccaactcctgctggcagctgcaaggaggacgctgagcccggtgcacacagatttgctctgggccagcctcccagagtgtgggaacccagggcggctgaggctggcgtttgaggaagcccggaaatgggcctctttcaccgtgcctgtcccgctggccaccaccgcagaggaagccacgcaccaactctgcacccgcctggagcagacacacgggcagctcctcgtggcccacgtgctgggctacattgtgtcttcccggtaagtctctgtgttttgaaactcttatttatttatttatgttttctttttttatttttagagatggaggtctggctatgtcacccaggctggagtgcagtggtgtgatcatagctcactgcagtctccaactcccaggctcaagtgatcctcacgcctcacctgctgagtagctgggactacgggcatgcaccactgtgcccagcaaaatataatttttttatttttatttttatttttagagataggggtctggctctgtcacccaggctggagtgcagtggcatgatcatagctcactgcagtctccaactcccaggctcaagtgatcctcccatctcagcctgccgagtagggtagctgggactacaggcatgcaccactgtgcccagctaaatacagtttttgtttgtcaactatacctcaaaagctgggaaaataaatacacacatgtaaaagaaagaaaggactgcctacatggttgcttagcctagtaaaagtctcggagctataaattgcaataaactaggccaggcgtggtggctcacacctgtaattccagcactttgggaggccgaggcgggcggatcacccaaggttgggagttggagaccagcctgacaaaacatggagaaactctgtctccactaaaaatacaaaaaattagccaggcgtggtggtgcatgcctgtaatcccagctacttgggaggctgaggtaggagaatcacttgaatccgggaggtggaggttgccgtgagccgagatcacgccattgcactccagcctgggcaacaagagcaaaactcgatctcaaaaaaaaaaaaaaaaatgcaataaacttgggtcatgatagtctggggccattgctcagagatgccagccaggtatggatgaggagtcaaaagtaacaagcatatattgctttttggatatagcaagaaaaagaaagaaagagagagagaaagagggaagaaaggcagacaggaaggaaggagacagaaaggaagagtgaaagaaggaaaggaaggaaggaaggagagagaaagaaaggaagagagaaagaaagagaaaggaaggaaggaaggaagggaggaaggaaggaaagaggcctggcatggtggcttacgcttttaatcgcagcactttgggaggccaaggcaggtggatcacttgaagtcaggaatttgagaccagtctggtcaacatggtgaaacctcatctcaactaagaatacaaaaattagcccggcatggtggcggtcacctgtaatcccagctgcttgggaggctgaggcaggagaatcacttgaacccgggaggcagaggttgcagtgagctgagatagtgccactgtgctccagcctgggcgacaaaggaagactccatctcaaaaagaaagagaaagagaaggaaggaaggaaggaaggaagatagtaagaaagaaaaaaaaagaaggaaagaagagataaaggaaagaaagaaagagaaagagagaaaaagggaaagaaggaaagaggaaagaagaaaggaaggaaagaaaagaagaagggaagaagaagaagaaaaagtgaaaggaaggaaggaaggaaggaagcaaaagcaaaaataacaagcagcagagaggaaggggttaatcagaagcacccaagcagccacactccctcctctgagtttgtcctctgccaattggcagagacgccaaggaacaaaactttgcctttactgcaactggccaacagcaaacactcaaaaccatcatccaaaatgctggacgacatagttttgcctcttctcagttttagggttgttttttttttttctcagcctgtgccatttcagacctttgtcggttaccacaaattcatctagagggtggtggtcaacccaacgaggaggtctttctgcctgtttctttgccagaaatagaaacacattcatgctagtgtaggaaataagagaatatgctgggtgcagtagctcactcctgtaatgccagcgttttgggaggctgaggtgggaggatcacttgaatccaggagtttgagaccagcctagacaacagagtgaggcccctgtctatacaacaattttttttaattagctgagcatggtggtgctactccggaggctgagatgggaggatcacttgagcacaggagttgaagactgcagtaagccataattgtgccactgggcttccttccaatgaagagttagggaaattcaagtctgtcttatagctgactccaggggacatatcccagatttcccgactggcttacactctataagagtacaaatacggcgtggtgtggtggctcacacccgtaatcccagcactttgggaggccaaggtgggagaattacttgagcccaggagttcaagaccagcctgggcaacaaagtgagagcccctgcctcagtgaaaagtaaaaatattagctgggcgtggtggctcacacctgtagtcccagctactcgggaggctgaggcaggaggatttgttgagccaggaggtcatggctgcagtgagctgtgatcatgccactgcactccagtctgggcaacagagcaagaccctgtctccaaaaacagtgcaaataacaactggggcatgttccagaatagaggggtggcccattgggccattctgttgaagttgacttggaggaagtgagttgtcatggaaactgtcataaaaatcagagcagcttctccttccttctccctctggggtcctctctgcacatcaactcctcttgtagactcttccttcggcccctctggaacttcagcttgccttgagccacagttggcatcaggagcccatatttctgtgaccaggtgccatcttactgactttttctttgggtcctaattccaaagtacagggagacagaaatcaaatggcctacttggtcccatatctggtccaattagtaaagccagatctctcacaggggtggcgggggaggtggtttataaagcatgatgataaggtggatgattttggttgctccagttccatgaaaatatgttatgcttacacatcagatccatgtggcaggatggtgagagctttgctcttggagcagacctgagatccttctaggctagaggtcgtcacctcaggatagttctccacgccccccatccccccacaggggacactagacagtgtgtctggaagcatttttggttgtcatgactgagcagggtggtgctcctggtgtctttactgagtggagtccagggatgctgtttaacaccctacagtgcaaaggattgtcctactttagagaatgatccagccccagatgttgatagtgcagagagtaagaaaccttgccttagcctgagagaccctatccattcatccatccatcaatccctccctccctccctccatcatctctatcatccatccatccatccatccatccatccatccatccattcatcaattcgacctttcatccatccattgtctctatcttccatccatctatccatcatctcaatcctccatccttccatccattctctctaaattccatctatccttccatccatcatctctatcttccttttatccatcatctctatcttccatctatccatccatccatccatccatccatccacccatcatctcgatcttccttccatccatcatctctatcatccatccatctattcatctatctatccatcatcttgacctttcatccatccgtccatcatctctatcttccatccatctatccatcatctcgatcttccatccttccgtccattctctctaaatccatctatccatccatccatcatctccatcttccatccatctatccatcatctctatattccatccatccatccacccatcatgtctatcttccatccatccatccatccacccattgtttctatcttctttccatccatcatctctatcatccatccacccatcatctctatcttccatccatctatccatccgtctatccgcccatcatttctatcttcctcccatccatcatctctattttccatccatccatccatccatccatccatccatccatccatccatcatctctatcttccattcatctatccatcatctcgatcttccatccttccacccattctctctaaagtccatctatccttccatccatcatctgtcttccttttatccatcatctctatcttccatccatccatccatccactctattcttccttgcatccatcatctctatcttccatccatccatcatctctagcatccatccatccatccatcatctctatcttccttccatccatcatctctatagccatccatccatccacccacctatcatctctatcatccatccatccatccatccatccatccacacatcatctctatcttccctgcatccatcatctctatcttccatccatccatccattcatccacccatccgtcatatctatctatctatgtctatctctatatatctatatatttctctatgtcccatcgataaatatgtatagtctcaatctatctctatcacttctagtaatctatcattgtatctctctaccatctgtctatacctatctaactctatatctatcccacatctacaaatacatcattttaatctatccacctatttaaatgatctatttatctatcatctctatttctatccatctagtcatttataatcaatcaataaatctctatatctatctctctatttctcatctatatcgatcctgtctatcattaatatctctctctctcttttttggggggggacagggtctcactctcttgacccagactggagtgcactgaagcgatcacagctcgccgcagtcttgacttcttgggctcaagcgatcctcccatctcagccccctctgagtagctgagactacaggtgcatgccaccacacccagttatttatttcttcttttttttctttgagacagagtctcactctgttgcttagcctggaatgcagtggtgcaatctcagctcactgcaacctccgcctcctaggttcaaatgattctcatgtctcagcctctcaagtagctgggattacaggcgtgcaccaccatgcctggctaatttttgtatctttagtagagacagggttttgccatattggccaggctggtctcgaactcctggcctcaaataatctgccaccttggcctcccaaagtgctaggattacaggaatgagccaccacatccagccttatttatttatttatttatttatttatttagtagagatggggtctcactatgttgcccaggctgctctcaaactcctgggctcaagcgatcctcccaccttggcctcccaaagtgctgggattacaggcgtgagccaccgtacctggcctataatctatctctgtatatacagttggctcttgaacaaactgggagttaggggaaccagctgtctcccaacgtacctcaaaattgatgtataacttttgactcccctaaaacttaaatactaatagcctactgttgaccagaagccttaccagtaacataaatggtcgacgaacatgtatttcatatgttctatgtattacagactgtattcctacaacaaaacaaggtagagaaaagaaaatgatagtaagaaaatcataaaggggggctgggcatggtggctcatgcttttaattccagctacttgggaggctgagtacgagaattgcttgaacctgggaggcggaggttgcagtgagcctagatcacgccattgcacttgagcctgggtgacagagcaagactctgcctcaaaaaaatagaaaataataaggaagaaaaatacatgtactattcatgaagtggaagtggatatcacaaaggtcttcatccttgtcatcttcacattgagtaggcagaggaagaggaggaagaggggaggaggagaaggggacttggtcttgctgtctcagagacagcacaggcggaagaaaatccacatataagtggactcatgcagttcaaacctgtgttcttcaagggtcaactatatgtctatctgcctatttatatctatttatctatcatctgtctatttatctttatgtttatctatctctgtatctattgctctatctcttatttatctctccatataatctgtctatctataatctatatgcctatctatacatctgcctgtctatcatgctaccagcatctagtgggtggaggcttgggtggagactgctacacatcctacaataggggtccccatcccccagtaccggtactgctccgtggcctgttaggaaccaggctgcacagcaggaggtgagcagtgggcgaacaagtgaagcttcatctgtatctacagccacttcttgctgctcctcatcactcccattaccacccgagctccccctcttgtcaggtcagcagcatcattagattctcataagagcacaaaccttgttgggaactgcgcatatgagggatctaggttgcttgaaccttatgagaatctaatgcctgatgacctgtcactgtctcccatcacccccagatgggactgtctactttcaggaaaacaagctcagggctcccactgattctacatgatggggagttgtagaattatttcgttatatattgcaatgtaataataatagaaataaagtgtgcaagtgtgatgcacttgatcatcccaaaaccatcacccctaccctggtccgcgggaaaaaaattgtcttccaagaaaccggtccctggtgccaaaaagactggggactgctgccctacaacacacaggacggtccccaccctaaaaaatgatctgaccccaaacatcaaccatgcgagcccaagaaacgctgcactcagcatgccctgtgccctctgggagcctcacttcctcctccgcatggaggggctggttgggagagcatccatcctccaaggctactggaaggaccaatgagatcatactcgccagaataagagttcagaaaaagaggaactagtgcattttcttcttagccctcaacagttttgcttttggcagatgaggaaactgaggcaaagagaaggtacattcctcaccaaggtctcccagctaggctcaaacgcaagcctgatgaccatgcacagccctgttttgcaattcaggctaggcgggtcctctgggagtgccaagtgaggtgcccgctctgaggttcgcattgcttaggggatgtcttcagggatgaagataggctctcaacctagcggttcacccatgaccaggggcacatctcctaggctctgtctgataccatatcatagaattttgcaggccaggtgcagtggctcacgcctaatcccaacactttgggaggctgaggcaggcagatcacctgagatcaggagttgaacagcagcctggccaacatagtgaaaccccatctctactaaaaatacaaaaattagccgggcgtggtggtgcacacctgtagtcccagctacatgggaggctgaggcaggagaatcgcttgaagccaggaggcagagattgcagtgagctgagatggcgccactgaactccaacctaggcaacagagtgagactctgtctcaaaaaaaaaaaaagaattttggaaagagtacagtgttgggtatgacattattaccaatatggtaactacaagccacaaaaactatggaacacttgaaaggtgcttcacacaactcagaaactgaatttaaaactttgaaagatggttcatgcaaccaagaaaccgcattttgaattttattaatttttaaccagtttaactttatttgtatttatttgttcatgtatttatgtatttattttagagacagggcctcactcttttgcccagtctggagtgcagtgatgtaatcacagctcactgcagcctcaacctcctgggctcaagtgatcctcccacctcagcctctagagtagcagggactacaggtgtgtgcccctatgcccagctaatttttaaatttttttgtagagatggggtctccctttgttgcctaggctggtcttgagctctggcctcgagcagtcctcctgcctcagcctcccaaagtgcagggattacaggtgtgagccaccacgcccagcccaattatcctaatttaaagacaagccttggtgggccagggtggagtggggtaggtgcagttggtttctgcattattttccttgagttaccacttccctccctatagtgtctgtctcagaccccttcgaggttgaggagcgggccatttatggttctgtaggtgtgcatgcagaggaaaagattggcactttgggagaccgaggcaggtggatcacgaggtcaggagttggagaccagcttgactaacatggtgaaaccccgtctctactaaaaatgcaaaaattagccaggcgtggtggcgcctgtagtcccagctactcaggagactgaggcaggagaatcgcttgaacccgcgaggcggaggttgcagtgagccgagattgcaccactgcactccaacctgggcgacagagtgaaactctgtctcaaaaaaaaaaaaaaaaaaaaaaaaaaaatcggaaaaggtcttccttggtgggtattgccctaaccgtgcttggtaccttgtgggcgctgtccaaatgctgatcccaggtgatgtgctggacaccgcgcgggtggctgtatccctccctctcttggattctgcatcctccaaatgcagaagacatgagatgtgcctcaaagccccactggtcctcccttcagacacggtctctcggaggcggagctgaaggatgttttgtccctggacgacgaggtcctgcaggatgtgtaccgagattggaccccgcccagcaaggagctgctgcgcttcccgcccctgctgtgggtgcggcttcgtcgggatctgggatactacttggcccggcggcccgtggatggcttcaccctcctggccattgcccacaggtaggtccaggcagcagtggcagcgacactgtctgggtgggaccccaagaatgaggactcactggccgggggtcttctcagtatcagatccttcacttaccattcccagggaatcaagtccagttagaactctgacacaattcacttatttttaaaattgagttgaggctggaagcagtggctcatgcctataatcccagcactttgtggggccagggcaggaggattgctggaggccaggagttggagatcagcctgggcaacgtagcgaggccccatctctacaaaaaaaataagaaaattagctaggtgtgttagcactttgggaggctgaggtggcggatcacctgaggtcaggagtttgagaccagtctgaccaacatggtgaaaccctgtctctattaaaaatacaaaaattagccagacgcggtggcacgtgcctgtaatcccagctgctcgggaggctgaggctggagaatcacttgaacctgggaggcagaggtggcagtgagccaagatcgcaccactgtactccagcctggcaacagagcgagactccatttcaaaaaaaagaaaattagctgggtgtgatggtacacacttgtggtcccagctacttgggaggctgaggtgggaggatcacttgagcccaggagtttgaggccacactgagccgtgactgtaccactgcactccagtctgggtgacagagtgagatcctgtttcaaactaaactaaactagactaaactaaactaaactaaactaaactaggtgaagttcatgaaacataaaattcaccattttattttattttattttattttattttattttattttattttatgtattttgagacagggtctcgcccaggctgcagtacagtggttgtcatcatggctcactgcagcctcaaactcctggactcaagcaaccctcccacctcagcctccggagtagctggaactacaggcatgcaccaccatgcctggctaatttttaaatttttttgtggagatggggtctcaccacattgcccaggctggtctcgagctcctgggctcaagagacacacccacatcggcctcccaaagtgctgggattacaggtgtgagctaccatgcctggccaattcaccacattttattttatttatttaattttattttattattttttgagacagagtcttgctctgttgcccaggctagagtgcagcggcacaatcttggctcactgcaacctctgcctcccaggtttcagcgattctcctgccttagcttcctgagtagctaggtttacaagcatgagccaccacacccagctaatttttgtatttttagtagagacgggtttcaccatgttggccacgctggtctcaaactcctgacctcaggtgatctgcccgccttggcctcccaaagtgctggggttacaggcgtgagccactgtgcccagtcagaattttaaagttgacaattgagtggtattttagtacactcataatgttgcacccctcacctctgtctagttccagaacgttttcatctccccaaaaggagaccctgtccccatcagccgtcactcctcattccccttccctaacccctggcagccactcatctgcttcctgtctctgtggatttgcctgttctgggcatttcagatcaacgaaatctcacactatgtggccttttgtgtctggcttctttcactcagcattatgttctcagggctcatccacattgtagcagggatcagtgcttccttccttttcatggctacataatatttcattgtatggatggaccaggttttgtttatcttcgtctatggatggacacttgcattgtttccacgtttttgctgttgtgaacatgcatgtgtaaggttttgtttgaacacctgttccctttctttctctttctttctttctttccttctttctctttttttccttttttctttttggagtctctctctgttgcccaggctggagtgcagtggcaccacctcagctcactgcaacctccacctgggaggagtgattctcctgcctcagcctcccaagagcacaccaccacgcccagctaatttttgtattcttttttttagtacagacagggtttcaccacgttggccaggctggtcttgaactcctgacctcaggtgatgcacccgcctcagcctcccaaagtgctgggatcacaggcatgagccactgcacccagcctgaacacctgtttcttaattctcggtatatacccaggagtggatttgctgggtcaggtggtaagttattttatgtgtaaattttggaggagctcaaatgttcctctttgaaatgtatgtaaggaaagtaaattgatgtaaggaaaaaaaaaacacggaccaatttagagatagatgtgatgtatcaaatagcacaggtggtcaacagagtggtttaggatggcttgggatttgggaactgcctccaggaagacaagcagccacctttgagcttgatgggtcacccaggtctatcagtctgtataccctctctgtagacagctggtcgaggtggtccgtgagcgctacctgtcaggatccgagagagccaagaggcatggcgtcctggccgacttcttctcagggacctggagccagggtaccaagaagctcatcactctgccacttgtggggaaaccactgaacttggaccgaaaggtgaggtacctgggacccccattccccacctgcaacctccaccctgcctggcattgctcacctccttccttcccctttttgcactcgaaatgtcctcccgacctacttctcctttccgcacagagggcaagatgtcccttctactgtcccccccactcctttttttttttttttttgagacagagtcttactctgtcgcccaggctggagtgcaatggcgtgatctcagctcactgcaacctctgcctcccaggttcaagccattttcctgcctcagcctcccaagtagctgggattacaggcacccgccaccatgcctggctaatttttgtatttttagtagagacggggtttcaccacgttggccatactggtctcgaactcctgcctgggcaacagagagaaactctgtctcaaaaacaaacaaacaaacaaagtacagagttattgtggactcttctccctgatgttaaaatcttatataactgttgtataatgattgcaactaggaaattacacttttaattctttggttatagcttgatgtttctttttctctgtcttccctgctggactggggaggctggaggcaggaccaggctctattctttttttggtgctgccttttctttttccctccctcgcttccttccttccttccttcctgacagagtcttgctctgtcacccaggctggagttcactggcatgatctcaggtcactacagcctctgcctcccaggttcaagcgattctcccactcagcctccctagtacctgggactacaggtgtgtgccactgcacctggctaatttttgtatttttagtagagacggggttttgccatgttggccaggctggtctcgaactcctgatctcaagtgatctgccttggcctcccaaagcactgagattacaggcgtgtaattacaggtgggattaccacacctagcctggtgctgacccttctcttctccccccgagacccattcacaaatcctttcctgtgtgcccagagtccctgcagactcagcttcatcctgcctctccaggacatggtctgagcccctttcattcacctagcctctcagtctcttgccctagtgcatcctcccaaggatgcttctgaccatccaatctgattatgattatgcctcttgtctaaaaccttccatagctccccagtgccctcagtcttgagcctgacctacccagcctgatattcagtgccttcgtgatctgctgcttacaagctccctactctcatttcccacccgcatcccctaacctgacttgtataattcagtcctcccaaactcagcctgctctttcacacctccagacctttgcccatgctgttcccttgccctggaatgccattgttttctgacacattttgccacatagatgcccacttaattctgaggctcagttccgatgcctctgccttcaggaaacattccctattcctcccagaaagtcccatgacctctggctttgattctctgagtcccagatgtcgtcctctgctccagccctgaccaatgggcacatgggggtatgtctgtcttccattgcattctcgtccactccagcactgtctggagcatgaggtgaatgaatgggcttgtgcgtggagtgaatgaatgggtttgtgtccaagctgcagtctcccttctcctctgccaggtggccccgcagcctctgtggttctcacatacggttgcaaacctgcggaagctgaaggagttgccctatcacctgcttcactcgggccgcctggaggagctgaaacaggaggttctgggtaagggctgccccccatctcagaggaccgagcctggtgactgcaccacgctccagtcttctagagcctggggagggtgaagggcaaacatggaaatccttcgttcctcctaaggcagaggttctcacaaggggcaattctacacccaggggatgccttacagtgtccgcagatagttttggttgtcacagctaggggagaaggcactacttgaatctggtgggtggaggccaggaatgctgcttaataccctacagtgcacaggacaccctaccacagaaaataatctagctccaaatgttggtgcatagagtgaaaacccctgccttatcatgagagaccctatctgtctgtctgtctatttgtcagtctgttcatccacctatccatccatccatccatccacccatcttctgtccatccatccatccatccatccatccatccatccatccatctaactatccatttatccacccatccatctatgatctccttattgagccatgagctggttataaccatccatccatccatccatccatccactcatccttctgtctgtccatccatccatccatcattctatctatctatccatgcacccattatatgtccattatctattcattcatctacctttctggtcatccatccatccatccacccatcattctatccatccacccacctatctttctgtttgtccatccatgcaccaatccacccaacattctttctatctccctctctctctctctctatccatccattcaccaatccccgtgattcttaaccagaagagattctgcccccccaggggacacttgacaatgtctgcagacatgtttgattgtcacacttggggtgggagtgctactggtatctggtgggtggaggccagggttgctgctttacatcccacaatgcatagttcagccccttaccacagagaatgatcctgccccagtgtcactactgctgagcctgagatgccctggaggaaatggagagatgattctccacctcccaggatgaactggagggaggtaggcacttcccacatcctccccccttctctccctcaggcagcatgagctggatttcctgccggggcatctctgggggcattgaagacctgctggatgactttgacctgtgtgcccctcacctggactcccctgaggttggcctggtccgtgaagccctccagctctgccgccctgctgtggagctccgaggcatgggtgagtccagatggcctggataggagtgaccaggacgggcactgacttctagaaacatgctctcctcattgagtcatgagctggattttcatcaattctcatacctttcctgtctaaacatgtgaattttcccccagcagtgcttctagaattttttttgacatgtggtatcgctgtgtcacccaggctggagttcagtggtgcaatcgtagctcactgtagcctcagactcctgggttcaaatgctcctcccacctcagcctcctgagtagctaggaccacaggtatgcaccactgtgccttgctaatttttctatttttcgtagagacagggtctcactgtgttgcccaggctagtctcaaactcctgggctcaagggatcttcttgcctcagcctcccagagtgctaggattatagatagacatgagccatggcgcctggcctagaattttaaattgagcctgggagagctttggactgaatactaccaaagcagggcccatcctgttgccctggacttttctttagaaagtgccaggtagggctgggcgcagtggctcacacctgtaatcccagcactctgggaagccgaggcaggcagatcacaaggtcagaagtttgagaccagcctggtcaatatggtgaaaccctgtctctactaaaaatacaaaaattagcagggtgtggtggtgggcacctgtagtcccagctactcgggaggctgaggcaggagaattgctggaacctgggaggcggaggttacagtgagccgagatcgcaccactgcactccagcctgggcaacagagtgagactccgtctcaaaaaaaaaaaaaaaaaaagaaagaaagaaaagaaagcaccagataggaactatttcgagaaaactcgaggaaattatgtaggtacatatatgataagagagaaaacaaagttcccacatattttttattgatgaaattcaaaatataataataactgagtacaaaacttcaggttcagagttggttttcactattatctggtccattgcaaacacatggctgtaaaaattattctcaggctgagcatgatggcttacacctgtagtcccagctacttgggaaggtgaggtgggaggatcaattgagcctgggaggtcgaggctgcagtaaactgtgattgctccgctgcattccagcctgggtgacagagcgagaccctgtctcaaaacgaacaaaccaaaaaaaaacttatttctagctcccagatgacttgggctgggtctggccctcagactgcaatttgctactccctgccctagagcttgaagaatctctccaagtctttagacgctctggccatgaggatgttctgtttggttttgttttaattatagcaaaatacatgtcttaaccattttttttttttgagacaggatctcgcttcattacccaggctagagtacagtggcatgatctcagctcactgcaacctccgcctatcaggctcaagagatcctcctacctcagccttctgagtagctgagactactgacatgtatcatcatgcctggctaatttttgtatattttgtagagacgggattttgccatgtttcacaggcaggtcttgaactcctggactcaagcaatcctcctgcctcagactcccaaagtgctgggatgacaggcatgaaccactgtgcctgacccccatcttaaccatttttatgtgtgcagttcagtgattaaatatattaataatgtgcagctatcaccaccattcatctccagaacttgttaatcttcctaaagtgaaactctgttttcattaaacattcactccctgtactagtctgttttcacactgctataaagaaacacccaagactgggtaatttacaaaggaaagaggtttaattgactcatagttctgcatggctgggaaggcctcaggaaacttacaatcatggcagaagggaaagaggtgcgtctttttttttttttttttttttttttttggtgagacagagtctcgctctgtcgcccaggctggagtgcagtggtgcgatctcggctcactgcaagctccgcctcctgggttcatgcatggcagcaggcgagagagagggagcaactgccttataaaaccatcggacggccaggtgtggtggctcacgcctataatcccagcactttgggaggccgaggcaggcagatcacttgaggtcaggagtttgagaccagcctggccaacatggtgaaaccccagctctactaaaaatacaaaaatttgtcaggcgtggtggcacatgcctgtagttccagctacttgagaggctgaggtgggaaaattgcttgaacacgggcggcagaggttgcagtgaccagaaatcccaccatgcactccagcctgggtgacagagtgagactgtgtctccaataaaacccaaaaaaccatcagatctcgtgaaaactcactgtcatgagaacagcatgggggaaccacccccatgatccaatcacctcccacctggtccctccctcaacatgtggggattatggggattacaattcaagatgagatttgggtagggacacagagccaacccatatctctccccattctcccttcaccccagtccctggcaaccaccatgctattttctgtctctataaatttgactgctttaggtatttcatataagtggtattttacagtatttgtcctttattctctgacttctcttactgagcagaatgtcctcaagtttcatccacattgtagcatatgtcagaatttccttcctttttttttttttttttttttttttgcacgacagagtctcgctctgtcacccaggctggagtgcagtggcacgatctcagctcaccgcaacctccacctcctgggttgctcaagcaattgtcctgcctcagcctccagagtagctgggattacaggtgtgtgccaccacatgcagctaatttttgtattttttagtagagatggggttttgctatgttagccaggctggtctcgaactcctgacctcatgtgatctgcccaccttggcctcccaaagtgctgggattacaggcttgagctaccatgcctggctaagaatttccttccttttcaaggctaagaatttccttccttttaaaggcttaataatattgcattgtatgaatatgccacattttgtttatccgttcatctgtctgtggacatttgtgtgtttctaccttttggatattgtgaaaaggaatcactagatcacatggaaattttgtgtttaactttttgaggaacgaccacttcattttccacaaaagctacaccattttataatcaaactatgggagacaataaataatatctttttctctacccttttatgttcagtgataggggcctgtgaattaagacagcttaacaggagaaagggctcacacattttaattttacatgcacagaagtttcacagaaaagtgaaaactcaaaggagtgtttagacctggggccttaaataccatgttaacaaagagcaataaattgtgagctgaattcacaaaggaagggggagtattcaagatgcttaagtctctgtatccaaagtgcttccccatggatgtgaataggatgttaaaaaggatgaccagtggcctgtgattcctatgcagagcttctaatcctggccctgcaaaccatccttgaactatctgcttctctttattctcctggccatcagcccagggccagtgctgctgtctctcctccagacagcatcctcggaggtctgcctactttggattcattcttaccctttggtttattttccatacagcactcagaagaatcttgaaagcccaaaacggccggggtggctcaagcctgttatctcggcactttgggaggctgaggcaggtggatcacttgatgccaggtgttcaagagacagggaacaaaagctgggaaaattgccttataaaaccatcagatggccaggtgtggtggctcatgcctataatcccagcacttcgggaggctgaggcaggcagatcacttgaggtcaggagtttgagaccagcctggccaacagggtgaaaccccatctctactaaaaatgcaaaaattagccaggcacggtagcacgcacctgtaatcccagttactcgggaggctgaggcaggagaattgcttgaacccagcaggcagaggttgcagtgagccgggatcacaccactgcactccagccttggcgacagagcaaaattccattaaaaaaaaaaaagagcccaaatctcactaagtatctctattgaatcttctagatggttctcccattgtccttgggataatgacctttccagtactgtagcctacatggctgtgtatgactcactctcctgggagatgcttgtctccatccttactgccccagacagtgatggaaacatccaagcttgcgtgccgggggccctgggctgggactcgcctcccccagcccttctgtggcaactttggagctcagctaaatgcgattcctcagagaagccttgtctggccaccactgaagcttaacttctctatgtctccccgatccttgcctctgaattttctatcactgcaccctgttttccatctgtcttggctctttttcttttttctttttttagagacaaagtcttgccctgttgtccaggctggagtgcaatggcatgatcatagcgcacagcaccttcaaactcctgggctccagtggtcctctcacctcagcctcccaagtagctgggaccacaggtgcacaccaccacccctggcttgtctttgcctttaattatgatttctcttggttttcttttgcatcatctgtctgccacatcagactctgagctccataaggccaatggcatcatctgttttctccctgccaaatttttacctttaacacattgatatggtttggctgtgtccccacccagctatcatcttgaattgtatttcccataatccccacacattgagggagggaccaggtggagataatcgaatcatggaggtgttttcctccatgctgttctcctgatactgagtaagctctcaagagatctgatggggctttttaaaataaggggcttccccctttgctcagctctcattcttctctctcctcccgccttgtgaagaagggcgtgtttgcttccccttccaccgtgattgtaagtttcctgaggcctccccagccctgcagaactgtaggtcaattaaacctctttcctttataaattacccagtttcaggtatgtctttattagcagcatgagaacagacaaatacacacagagaccacaaattttgagccccaccgtgtccattgaaatcttggcgctgccacttcttggcagtgtgaccttgcaaaccctttaccatccctccccctgccccacagccctcagttttcccatctgcagaatagggatgctgagtgaccatcccacctagggctgctgggaagagtacgcgcatcagttcacacagaacctccacccgtgttgccatcgagggtcctgttactgtcatatgatagcattgttgacatgaatagcctaggatgagctatttctgccctgaaaccctatttttgtcatctgcaaaatgtgcaattgaactaaaatgtgtccagaactccacccaatgtgaagatgctggtgcctgcaatcatttatgcctttcttatgcattcacacaacccctactgattatctgccatagccccagctcccacagggacctaaatatagttaatgtttgtctcagcctttaagagagggagatggggccgagtgcgggggttcacgcttctaatcccagcactttgggaggcccagacagaaggattgctagagggcaggagttcaagaccatcctgggcaacatagcgagaccctatctctgtaaaaaaaaattaattagttaaaaatagatagatggctgggcacagtggctcacgcctgtaaccccaatactttgagaagccgaggcaggcagattgcttgaggccaggagtttgagaccagccttggtgacagtgaaaccccatctctactaaaaatacaaaaattagccgggtgtggtggtgcatgcctgtaatcccagcttcttgggaggctgaggcacgaaaattgcttgaacccgggaggcagatgttgcggtgagccgagatcacgccaccgcactccaacttgcacgacagagcaagactctgtctcaaaatacacaaataaataaagagaaggagatggaacagcataccaaacaactggaatttaaggcaactggaaagaaaaataacgcgagaggcgctcgccaggagttgtaaaccttgatggagcaacttcccaggaaaacagccttgggcatgacttcccattttaaggaagatttaaaagcccagatctctcagcaagttccctgcaaagccccttgattgacaacctgtggctcccccagcacaaggaggaggtgtaggaacaaatgttatcaccagagggcgctgctggacaaccatgtgctctccgtacatccaagcacgctggcgaatggggaccattcaacataacatcctaaatgatccaacgcgatcacgagtccttttttttttttttttttgagaaggagcctcgctctgtcacccaacttctgcctcctgggttccagcgattctcctgtctcagcctcccgagtagctgggattacaggcctgcgcgccaccatgctcggctaatttttcttaatagcccattttttaatagaacggttttaggttcacagcaaaattgagtgaaaggtacaaagatttccaatatatccctcctctgatcctacttttattgaaaaggttgagtctgagcacagtggctcacgcctataattccagagctttgaggggtcgaggaaggaggatatcttgagcccagaagtttgagaccagcctgggcaacataacgagaccccgtctctacaaaaaataaaaaactaacgaggcgtggtgacgtgcatctgcagtcccagctaatatagaggctgtggccggaagatcgcttgagcccaggagtttgaggctgcagtgagctgcgatcgtgccactgcactccagcctgggtgacagagtaagaccctgtctctaaaaaaataaatagccaggcgcggtggctcatgcctgtaatcccagcactttaggaggccgaggcaggtggatcacttgaggtcagcccagccaacatggtgaaaccccgtttccactagacacacaaaaattagttgggcctggtggcgggcacctgtagtcccagctattagggaggctgaggcaggagaatcgcttgaacctgggaggtgcaggttgcagtgagccaagatcgcaccattgcactccaacctaggtgacaggctaaaattccatctcaaaaataaataaataaaataaaataaaacaaacaaataaattagctgagtgtggtggcgcatgcctgtagtccctagtatttgggaggctgagatgggaggattgcttgagcccagaagtttgaggctgcagttagctttgatcatgccactgcactccagccgggacaacagagtgtgataaaagaggaaggaagaaaggaagggagagagggagagaagaagggagggaggaaggaaagggaagcattctaggcaacctgggcaaaggctggagactggaaacagctgggtgcctctgaagcaagggtaagtgtgtctggagagcagagaaggagacaggagcggacagcagaggccagtagctgaggtattgtgtcttcttttgttctggagcccctgcagggagcagagactcaattggcagggagggtagagggggctcaatccaggcaacttagtctacatccctttgttgcagagaggagcctcctgtacacagaactgctggccagactccatttcttcgccacctcacatccagcactggtgggacagctatgccaacaggcccagagctggttccagttgtgcgcacaccctgtgctggtgcccctcggaggattcctccagcccccgggaggacccctccgggcaactctcagcggctgtcacaaaggtgagtctccccagcatagcaaaaatcccagcaggcacctgcttgcctgggggcagtgaaggccaggtgtttgaggttgtcctctgggactcccctgtgctagttgggaggccccaagcttgccatcagagcctgcccctgctgtctcatgctgaatcagctctctctgccccacctcaagggactgtagatgtctcatataaattcttctaatgagcccgatgctagggggtgcctccaagcttcccatctccaagggattggtgcccatctgacagtttcagctatttacaagctcatgctagtaattctgaaagctaggaactgatgcctgacagtcctctgagaagctgaaggaactgtaagcagcccttggaatcccagaatgtaagggagaggagaggatttaggttttgccatccatttgtcattcatttttttcttccttccattcatccaaccatctatgcatccatcctttcattcaccttcctactcttccatccaattaccctcccatccattcattcatctctctatctacctcccacccttccattcatctatccatccatccaccagcctcccacccacccatccattcatccatccatctatccatccatccatccatccatccatccatccatccattaattcaccttcctactcttccatccaattaccctcccatccattcatccatctatctacactcccacccttccattcatctatccatccatccatccaccgtcctcccacccacccatccattcatccacccatcttctctgccacccttccatccatctactgccccatccatccatccatccatccaccttcccactctcccatccatctatcctcccacccttccatccatctatccatccattcactcatccacccacccattcatacatcagttgtccattcatccaatcatctacccacccttccatttatccatcaattcatctatcaaaccactttcctctccatccatccatccatccatcctcccacccatccacccatccatctacccaccctgctacctttccatccatctatcccccatctctaaatccatctaccctcccactctttcattcatctactgttccactgttccatccatccacccatccacccatccatccatctatccatctaccctaccactgtttcatttatctagccccattcatccatccacccatccgttattcatcgattcatcaaatcatttactcaccttttcattaatctatccatccatccattcatcaaatcaccttcccatcctttcatccgtccatccacccacccttccatccactcacccacctacacacctttccttccatccatccactcacccatccattcatccattcattcatccttcaaccctttctttcttccttccttcctctcttctatccacccatcagtcatccacccctctacccacttatccttccattttcttcatctgatcatcttccattcattcacttacgcctccacccatccacacacttagccattcatcaactttctcacttcaatttcatcgagaaactgattcctccatctacccatctacctgcccatccattcacccactcactcatccaactagccacctgtctacccactcatttacctccattcacccatctatttatctgcccacccacaatctctcacactgattgtgagaccactgagttcacttgtggttcaaatgtcagagctccttactgtgccacatgacctggcagtgagagctgcactccccaggcacattattttcaaaatagaaatgctaagagacactaagtacaatgcatggaggagttgatttaggggcagccactagaatgctgtgttgaggattctaagactgaagctagcttagtgggaaagagtgtgtatttgttagaatataggctcagatgttgtaaaaaaaaatggccaaaatatcagtggcttaaataagataggagtttaattctctcttttgaaatagttcaagcaaaagcagaggcaagagggagtctttagggtgtctgggacccatactctttcagtctggcgctctgccattttcagtgtagggctgtcctcgttggcccaatatagctgctccaactcctaccatcaagatggcattccagccagtggggaataggagaagcagatggcaggcctcttcattttaagggcacgacctggaagcagaactaaatatttccactcctgtctcattggcaagaacttggatatctccaactgtaaggaagcctgggaaatatgtttttatatttttatttttatttttactttttatatggagttttgttcttgtcgcccaggctggagtgcagtggcgcaatctcggctcactgcacctctgcttcccagattcaagccattttcctgcctcagcctcccaagtagctgggattacaggcacatgccaccatgcctggctaatttttgtattcttggtagagacagggtttcaccatgttggccaggctggtctcaaactcctgacctcaggtgatcgcctaccttggcctcccaaagtgctgggattacagggttgagccactgtgctcagccagggaaatgtggtctttgtgcggataactatgtactcagctaaaacctgtaggcttttgggttttattactaaaggtgagatgatagaatgactatgggggcacaaatcgcacatagtgctgtgattgattaatgatgtctgtcatggcacaggcataggaagttacagcttagcgtgacatttttctcatctctggggcagggaaatgttctgtgtttcagatccactgtgccccgctgtacatcctctagttctgttaaagttgagaaagttcttacctgtgtggacttcagtttgttcatttttaatatgaaaagtatggccaggcatggtggctcacgcctgtaatcccagcgctttgggaggttgaggcaggtggatcatgagatcaggagttcaagaccagcctggcctacatggtgaaaccctgtctctactaaaaatacaaaaattagccgggcgttgtagcggacacctgtaatcccagctactctggaggctgaggcaggagaattgcttgaaactggaaggcggaggttgcagtgagcggagatcgttccactgcactccagcctgggcgaaagagtaaaactccgtctcacaaaaaaaaaaaaaatgaaaagtatgagttaatatttccaaggtcacacaatgagtgcataagaaaaaaagtaaaaggggctgagcacagtgatttatgcctataatcccagctctttgggaggccaaggcaagaagatctcttgggccgagatgttcaagaccagcctgggcaacataaggagaccttgcctctacaaaaagttaaaaaaaaaaaaaaaaaaaaaagctggtcatggtggtatgtgcctatagtctcagctactcaggaggctaagatgggagaatggcttgagcccaagagttcgaggctgcagtgagctgtgattgtggcactgcactccagcctgggtgatagagtgagaccctatctgaaaaaaaaaaagaagaagaaaaggaagggaaggagagtggggaggggaagggagggaaaggagagggaagagggaaggaactggagggaagggaaagggaactggagggaagagggaagggaaggggaaaggggaagaaagggaaggggagggaaggggaaaggggaagaaagggaaggggagggaaggggaggggaaaggggagggaagggaaggggaagggaaaggggagggaagggaaggggaggggaaaggggagggaagggaaggggaggggaaagggaaggggaggggagggaaggggagggaaggggaagggaaaggggagggaaggggaggggagggaaagggagggaagagaagaggaggaaaggggaggggaaagaggagggaagggaaggggaggggaaagaggagagaaggggaggggaggggaagggaggggagggaaggagagggaaagggagggaaggggaagggaaaggggaaggaagggaaggaaaggggagggaatgggaggggagggaagaggagggaaggggaagggaaaggggaggaaagggaaggggaggggagaggtgagaaagggatgggagtgaagagggagagaaggggaggggaaggagaggaggggataggggaggggaggggaaagtggaggggaggggaaaggggagggaagtggaggggaagggggagggaaggggaagggaaaggggagagcaggggaaaaaggagggaaggagaaaggggagggaagggaagggaaggggagggaaggggatgggagggaaaggaaggagaggggagggaatgagagggtagggaagaggagggaaggggaagggaaaggggagggaagggaagggaaggggagggaagggaagagggagagaaggggaggggaaagggaagggaagaggggggaaggggaggggagaggaaaggggaaggaaagagaaaggggaggggaaggaaaggaaagggagggaagggaaagggaaggaaaggaaagggagggaagggaaagggaaggaaatggaggaagggggagggaagggaaagggaaggaaggggagggaagggaaagggagggaaggggaggagaagaaaggaaaagaaaacaaatcccatctcctcactctctgtcccgatgaggtggaaacaaaattctgtattctcagagcttgacgggctctgattcagcaccacccattttacacatgtggaagaggcacacagaaggaaaaggacttcctttctttactccaggacattcagaaagttcagtttcttagtgtctaggcccacgttttctccaatatatcttggcccttctctctctgcagtgatattttaatcaaactccaccaggcagagatccttggggtgtgtttgcccaattcattggcaaatatatattttttttctttaggacatcagcccttgtttttctacaccagttgaactcagagatgtcaaaaacataatcctcattctcagccaatataatttctttctttcttttcttttctttcttcttcttcttcttcttttttttttttttgttgttgttgttgttgttgagacagagtctccctctctcacccaggttggagtgcagtggtgtgatctcagctcactgcaacctccacctcctgggctcaagtcattctctggcctcagcctcccgagtagctgggattacaggtgtgcttcactatgcctggctaatttttatatttttagtagagactgggtttctccatgttggacaggctggtcttgaactcctgacctcaagtgatccgcccacctcggcctcccaaagtttggcctcccaaagtattggcctcccacagtgctgggtggcatgagccaccgtgcccggccatggccaatgtgattttgtttctgagttttcttcaactaaggcagggtttctcagccatggcattgctgacttctggggctgaatctttctctgggatggggttgtcatgcgttgctgggtgttgaacagcatccctggcctgcacccaccagatggcagtactgtccttgagcatccttgtccccattgtggcacctcaagatgtctccagaaaccgatatgtgtccgctgggtgagcactgctagactagacagacacttatgaccacactgtgatgcagtccccttccctacctaagagcgaagtgaatgtcacaggccagagtgtgaatctgtgcatctgagtctgcgaatctaatccttgctgtgcagctttgggcaagggaccaaatctctctgtgcctcagttgtcttatctgtgaagtggggggctcattagaggaccccatagctgaatacttggacacaggaactgagatcattgctgttgcctctgtgtggctgcaggcatcaccgccatggcatggggtgtggaggagaagctgctggtgattggcacccaggatggcatcatggctgtgtgggacatggaagagcagcatgtgatccacatgctaactggacacacaggtgagacttgggaagtgggctttgtggtcagcttccatagtgaaaagttggttctcagagccccttccccacagattcacttctctgtattgaaaccctggcctttgttcctgcatcacttagctatagttgcataatgaaccatccccaaacacagtagtttcaaacaagccatttctttttctttttaaatatgggatctcactgtattgcccaggctggagtgcagtggtgtgtttataactcactgcagcctcaaactcctgggccaagtgatcctcctgcctcagcctcctgagtagctgggactacaagcacataccactatacccagctaattttttaatgtttttagaaatggggtcttgctatgttgcccaggctggtctgaaactcttgggctcaagtgatcctccctccttagcctaccaagtagctgggattacaaatttgagccacaaacaagctatttctttagctcacttcctgtgcattggcaatgcaggctggacgcagctgggcagttttctgctctcagctgggcttgctcatgtatctgcagtcagtcagtggattatctaggagctggctgaatctgaatattttcaaatgaggcaactcaactttgctccacgtggtctgtcatcattcagcgtccttcaggtctctcatccccagcaaaggcaaggtttctttttttttttttttgagacggagtcttgctctgtcgcccaagctagagtgcagtggtgcaatctcggctcactgtaagctctgcctcccaggttcacgccattctcctgcctcagcctcccgagtagctgggactacaggcgcccgccaccatgcctggctaattttttatattttttagtagagacggggtttcaccgtgttagccaggatggtctcaatctcctgaccttgtgatccacccacctcgtcctcccaaagtgctgggattacaggcgtgagccaccgtgcccagccaaaggcagggtttcaagaaaacaagtaggcactcacagaatctcttaagcctggacttggagttggcacctggtcacattcacattctcttgaccaaaggaattcacaagagcagtccagtagggaaataggctaaataggctttctgccttcttttcttttctctttcctttcctttcctttctcttctctttccttttctttttctcattctttttttctgacagggtgttgctctgttgcccaagctggagtgcagtggcacaatctcagctcactgcactctcagcctcctgggctcaagcaatcctcccatctcagcctcttgagtagctgggactgcaggcacacaccaccacacctggctgatttttgtattttttggtagagacagggtctcactatgttgctgaggctggtctcaagctcctgagctcaagcaatcctctcgccttgtccttccaaagtgctgagattacaggtgtgagccactacacccagcctaggcttcattttttgatgggaggagctgcaaagtcacattgccaaggatgtggatcagtaagggtaaagaattgtggtcctttttgcatttgtcgacctcagatcctaagtaaggttgtttatttctacatagtcccttaacagatatggcttatttctgtaatcaattgttgagtgcctgctgagtaccaggtcctgttctagatgctgaagagagatagacgagggtcgggactaggatggaaaactattcattcttgaagactaatctcaagggtcctccctttgggagagatgattcccacagtagagttcataactagctaccttgtgctctcctgcagcttgatatacataggaccacattggctaagactacagttggctgggcgtggtggcttatcccagcactttaggaggctgaggcaggcagatcatttaagctcaggattttgagaccagcttgggcaacatggtgaacccacatctctacaaaaaatgcaaaaattagccaggcatggtggtgcacacctttagtcccagctacttgggaggctggggcatgagaatcgcttgagctcaggagattggggctacagtgagctgtgattacaccactgtactctagcctgtgcaacacagcgagaccctatctcaaaaaaaaaagcaagactacatttatttgttgacctgagatcttattactattgtttgagggcaagggttatgttttattcaacatactccatgcttatttgttgaataaataagttaaaatatcccatgtgtttaaaaaatacatttaacagaatcaagtcatcgaaaattagctttagaaagaatctaatctaggccaggtgcagtggctcacgcttgtaatctcagcactttgggaggcctaggcgggtggatcacaaggtcaggagatcgagaccatcctggctaacacggtgaaaccctgtctctactaaaaatacaaaaaaaattagctgggcgtgatggtgggtgcctgtagtcccagctactcgggaggctgaggcaggagaatggcatcaacccaggaggtggtgcttgcagtgagccgagattgcaccactgcactccagcctgggcgacagagtgagactctgtctcaaaaaaaaaaaaaagaaaaaaaaaaagaatctaatctaacccttttatgtaattaagaaaacaggttgggcattttatttaattaataaaacaggactcacacctgtaatcccagcactttgaagatgggaggatcacttgaggcccagaattcaagaccagcctgtgcaacatagcaagacgtcacctctaaaaaaaaaaaaaaaaaaaaaagtgttttaaattagccaggcatggtggtgtgcacctgaagtcccagctacgtgagaggctgagccaagaggattgcttgagtccaggagttggaggctgcagtgagccatgtttgcaccactgtattccatcctgggcgacagagtgagaccttgtttccaaaaaaccaaacaaacagaaaaatgggtgggggtggagaaggtctaaagagctgaatcaaatttctattagagatgacatattcaaatttttaaaaaatttaaaggggtgccctaaaaggctcaattgacaagatacataatattatgacacaatcttttgaaaaatcaaaagtttaattggccctccatatctgtgggttttgcatctatagattcaaccgactgtggattgaaaatatttggaaaagctggatgcagtggtgtgtgcctgtagtcccagctacaaggaggaggatgccttgagcccgggtgtttgagttcagcctgggcaacagagtgagatcctgtcttttggttgttgttggctgtgtttctttttctttcttccttttccttctttctttctttctttctttctctttctttttccatccttccttccttctttccttcctttccttccttccttcccttccttccccccttccccttcctcccttctttccttcctccctccctccctcctttctctctctctttctttctttccttctttctttcttttctttctttcttttttttttttcaggatctcactctgtcatccatgctggagcacaatggtgcaatcatagtacactacaatcttgacatcccaggttcaagcaatcctcccacctcagcctcctgaagagctaggagcacaggtgcatgccaccatgcccaactactttttaaaacagtttttgtagagactgggtctcaccgtgtttcccaggctggtcttgaattcctggtatcaagccatcctcccacctcagcctcctgaagtgctggaattacaggcataagccactgtacctgtctcttaaaaataaatttaaaggtggggaacggtggctcatgcctgtaatcccagcactttgggaggccgaggtgggtggatcacctgagatcaggagtttgagaccagcctggctaacatgatgaaactctgtctctactaaaaatacaaaattagccgggcgtggtgatatatacctgtaatcccagctactcgggaggctgaggcaggagaatcacttgaacccaggaggtggaggttgcagtgagccgagatcgcgccactgcactccagcctgggcaaaaagagcaaaactccatctcaaaaaataaaaataataaaataataaataaataaaataaaaataaaataataaaataaaaaataaataaaaataaaatttaagaccctgtctcttaaaacaaataaacaaataaatacaatttttacaaaggaaaatatttgggaaaaaaatagttaactgcatctggactaaacatggacagacctttattgtcattgtcccccaaacaatgcagtataacaactatttacatagcacgtatgccatattaggtattgtaagtaacctagagatgatttaaaatatacaggagtggccgggcacagtggatcacgtctgtaatcccaacacttcgggaggccgcggatcacctgaggtcaggagttcgaaaccagcctggccaatatggcgaaaccccatctctactaaaagtataaaaattagctgggcgtggtggtgcacacctgtagtcctagctacttgggagaccgaagcaggaagatcacttgaacctgggaggtggaggttgctgtgagccgagatcatgccactgcactccagccttggtgacagtgagactcagtcttaaaaagaaaaaaaaaaaaagaaaaattaagtatacaggagcacctgtagtcccaggctgcggctgaggcagaaggatcgcttgagcctgggagatcgaggctgcagtgggctgtgattgcattactatgctccagccggggtaacacagccagacccgtatctctaaaaataataataatggtaacaatagtaataaagtatacaggaggatatatataggctatatgcaaatacgacactatttcgtataaggcactggagcatctgtggattttggtatccgcaggggtgaaggaagggcaggggagaggaaagagcctcccaggcacagggagcagcaagtgcaaaggccctgagaggggaatgaggttggcgggtctacagaacagcaaggaaatcatgaggctggagctccagagattatgtcaaataaaaaggagcagtcggctgggcgcggtggctcacgcctgtaatcccagcactttgggaggccaaggtgggcagatcacgaggtcaagagatcgagaccatcctggccaacatggtgaacccctgtctctactaaaaatacaaaaattagccaggtgtgatggcacacacctgtagtcccagctactcaggaggctgaggcaagagaatcacttgaacccggggggcggaggttgcagtgagccgagatcgcgccactgcactccagcctgggcgatgacagagtgagactccgtctccaaaaaaaaaaacaacaaaacaacaacaaaaacagcagtcaccaggggccacatggtgtgcgactcccatggatatgaaatgtccagaacagactaatccacagagacaggagagacaagaggcagattagtggtggccaggggttaggggaggggagtggggagtgactgctgatggggacagggtctccttctggggggttgcgaatgttctggaactagatagagtgatggttgcacaacactgtgaatggctaaatgccactggattgtttgctttaaaattattaatgtgataggccaggcgcggtggctcacgcatgtaatcctagcagtttgggaggttgaggcgggcacatcatttgaggtcagaagttcgagaccagcctggacaacatggtgaaaccccatctctactaaacatacaaaattagttgggcatggtggcgcatgtctgtaatcccagctactcaggaggctgaggcaggagaatcgcttgaatcctggagtgggaggttgcagtgagccgagattgcgtcactgcactccagcctgggagacagagtgagactctgtctcaaaaaaataaaataaaataaaataaaataaacaaacaaaatttaaaaaattaacgtgataaagaaaaaagaggatgactgttttctgagattatgaaaatgttctgaacttatatatatatacacttatatatacatattttaatctatatttttgtgtatgtatatatttatgctttatgtatgtaaaacataatatatatgtgtgaataaaacataaatatatacatacatgaaagtatatatacatatatacaaaaacaaatatatacataaatatataaatatatactatatatatatttttatcaatgttttgccataaacattcttttgtgtccattgactcttttttttaaatttttttgtttttgagatagagtcccactctgtcgcccaggctggagtgcaatgacatgatcttggctccctgcaacctccgcctcccaggttcaagcaatcttcctgcctcagcctcccaagtagctgagattacaggcgcctgccaccacacccagctaatttttgtatttttagtagaaacaaggttttgccatgttggccaggctagtctcgaacccctgacctcaactgattcacccaccttggccttccaaagtgttgggtttacaggcgtgagccactgtgccagcctatttttattatttttacttttttttttagagacagggactcactatgttgcccggcttgtctcggactcctgggctcaagtgaccctcccacttcggcccctgaaagtgctgggattacaggtgtgagccacctggcccagtcatatccttgttctgttattgtattttatttcatttataatttccaccatcaatttcacagggtacatgtgcatgtctgctacatgggtatattgagtgatgctgagatttggggtacgaatgatcccatcactgaggtagtgagcatggtacccaagaggaattttgttagcccttgaccctcttcctccttccccattccagtagtccccagtatctgttgttcccatctttatgttggggacactttttttttttgagacagagtctcactctgttgcccaggctggagtgtagtggtccagtcttggctcactgcaacctctgcttcccaggttcaagcgagtttcctgcctcagcttcccgaggagctgggattacaggcgcacaccaccacacccagctaactttcgtatttttagtagagacggggttttgccttgttggccaggctggtctcgattcgaactcctgagctcaggcgatctgcccgcctcagcctcccaacgtgctgggattacaggcatgagccaccctgcccagcctgggattacttttataaggacagtaatcccattccccagagcgccatcctcataacctaatcacagcctgatgaactttttgtttattaagcagaatctccatttgtctgttatatgttgcaaatatttcctccacatctctcatgatgtgccttccaactgcagtttatcctcctgaagttttacatttctacataatccagttggtcagtttttcccctttatgccttccaaattgtacgttttgcttagcaaatagctctctaagattattatatttatttatttattttgagacaaggtcttgctgtgttgctgaggctggagtgcagaggagtgatcatagctcactccagcctcaacctcctgcgctcaaatgatcctcccacctcagcttcccgagtagctaggaccacaggtgcatgccaccccacctggctaattatttttttgcaagattataaaaatgatgagagaaatcctataatttttctagaagttgccccttttttacgtggttattaattttagacactcttagatgctgaatctttataaaactcaattatctgtttagtattcaacatctggggcaactgattgactcccaaccagttgtggccctctgaattttgctttgccacatttcattattttccatttggacaggttctatcaatttaaccaacagagagaggctctcaaaacaaaacaaaagtaaaaagaggctgggcacagtggctcacgcctgtaatcccagcactttggaaggccgaggcgggtggatcacctgaggtcaggagcttgagaccagcctggccaatgtggtgaaaccccatctctactaaaaatacaaaaattagccaggcgcggtggcacatgcctgtaatcccagctactcaggaagctgaggcatgagaattgcttgaacccatgagacacaggttgcagtgagccaagattatgccactgaactccagcctgggtgacagagcaagactccatctcaaaatagtaataataacaataataataataataataataataataatcatcatcatcatcatcatcatcatcatcatcatcatcataggccaggcgcggcggctcatgcctgtaatcccagcactgtgggaggccgaggtgggtagatcacctgaggtcaggagttcgagaccagcctggccaacatgatgaaactgtgtctctactaaaaatacaaaaaatttgccaagtgtggtggtgggcacctgtaatcccagctactcgagaggctgaaacaggagaattgcttgaacccgggaagtgaaggttgcaataagccagggccacgccactgcactccagcctgggcaacaagagcaaaacttcatctcaaaataataataataataataataataataataataataataataataataataaaaggccaggcatggtggctcatgcctgtaatcccagcacttgggaggctcaggtgggtggatcgcttgaggccaggagttcaaggccagcctcgccaacatagtcaaacccgtctccactaaaaatagaaaaaattagccaggcatggcggcaggtgcctgtaatcccagctacatgggaggctgaggcacgagaatcacttgaacccaggaggcagaggttgcagtgaaccaagattgagccactgcattccagcctgggtgacagagagagtccgtcaaaaaaaaaaaaaaaaaaagagggttacataattgttttgaaataattatccttgattacaaaaatcaataatgagggtgtggctggacaggaagttgctgggcagattgccttgcagatgtattttttctgtaaggttgcagtagcctttgtgcaaggttgtgatttttgtagttttttctgttattaggcatacaagcgtgagaactctttctccatagccttcctttatagcctgtttgccagggttttcttaatgttattgactccatttttattctgatgactttcacaattcaattccatccatcttttctttggtaaatgagggtatttccaagctgacaagcattttaatagttgcaaggccaaaatgttcccagctaatatactctcccctaccctggcctgctgcaggagaggtgaggtgtgtgaaaatatttgccaaagggaccctcgccaactctgcttcaaaggattacacgctgcacttgtggaacttactctctggccaggagaaatttaccatttgggatggaggctcaaaaaatcccgctgaacctcagatctggaaccttcatgtggatgaggcacacaaagttgtgtattcagcatctggctcaaaggtaacaaacatatgccctgtttgtaaaggaaagctgagaccagagcattcaaagacagaataggccatttctataaggagggctccctgatacagtgatggggtgggggtgtaaatggagtacacaaccacttgagagggtgctataagaggtttcagacttcatagttggattagacaatcctgataattctttctgaccccaagatttgaaacctttcatcttttttgaatatcagcattttagggctataaatttccctcaaagtactgctttacctacatcctgtaaattttgacgtgtgttttcatttacattcagtttaaaatactttcagatttcacttttgatttcttctttgatccatgggctatttaaaagtatactattagtttccagatatttgaggaatttctggatagggtcctgttctgtattttttttctaattaaattccattttgatgatgtaaaacctttcaaattcattgagacttcttttatagtctctctctctcctctctctctttttttttttttttttttgagatggagtcctgctctgtcgcccaggctggagtacagtggtacaatctcagctcactgcaacctccacctcccaggttgaagtgattctcctgcctcaggctcctgaatagctgggactacaggcgcacgccaccacgcccagctaatttttgtatttttagtagagacagggtttcaccatgttggccaggctggtctcaaactcttgacctcaggtgatccacctgccttggcctcccaaagtgctgggattacaggcctgagccatcatgcctagcttgttttatagtctctctaaatgatctgtgggcttctgaaaacaatgtctgttccactgtgttattccattacatcaatcataaccctgtgatttcatagttttataaatggagacacacaataacttcgtgggtgatagcttactaattgatgccaggaggaaaaaaaatctttatttaactaccagttgagtttcttgggaactcagtgaccttggttgtgtcattcaccattctgagtcttattgctgcctcttcctcataagatcatgagacatatcctggcatagtgcttagcacactgtaagcaccaaataattgatatctatttattattatgttacataagtaattggtggttgttgacagtaatatcagtgcatataaatcatgctgcccaaaataggagtcaccaaccagatgtacctattaaacacttgaaattcggggggtagggggtaaggggagggagagcattaggacaaatacctaatgcatgtggggcttaaaacctagatgacgggttgatagttgcagcaaaccaccatggcacatgtatacctatgtaacaaacctgcacgttcggcacatgtatcccaaaactgaaagtaacattaaaaaaaaataaataaataaataaataaataaataaataaaaacacttgaaatgtgactgtcccaacatgctgaaattcaaagacctagtatagtaaaaataatataaaccatctcaataataatttttgtattgattacatgttgaagtgataccacttggacatattaggttgaataaaatataatactaaaattgatttcacttgtttctttgtaccttttgtaaggtagctaatgagtttaaaatcacatgtgaggcctggcccacctctcctttttttctctgaattgggagtgttaaaaataaaatgcataggccgggtgcagtggctcacactcataatcccagcactttgagaggctgagcagggaggatagtttgagcccaggagctcaggagcagcctgggcaacatagtcagaccctgcctctacaaaaacaaatttaaaaatagccaggcatggtggtgcgtgtctgtggtcccagcttcttgggaggctgaggcaggaggattgcttgagcccaggaggtcgatgctgcagtgagccatgattgcaccactgcactccagcctgggtgaaaaagagaggctctgtctccaaaagaaaagaaaatgcataaagtatacaagagaaggcatcttgcatttgactccgggaaacttgtagtctaggtctcctgccaagatgctgcttcctcttcattattctattagatcaatgcttggaatctggaaactgcagagccggtattccatatcctgggagatgcctctgatccttggatgtgcatggccgtgctggcctcccaggccacactgctgacagtgtccagggatggtgtggtcagtctgtggagctcagctacgggaaaacttcaggggaagcaacatatgtccagcatcaaagaagaaacacctacctgtgccgtctcagtccagaagcaaggaaagcttgttaccgggtttagcaatggctccatctctttggtaagcacctttactgactatgatgtgaacattaactcagcttgaaagtgctcagatgtgctagaagttgggaaaaataatcttgccttgtatctttgttttgttttggagatgaagtttcacttttgttgcccaggctggagtgcaatggtgtaatctcagctcactgcaacctccgcctctcgggttcaagcgattctcactgcctcagccttccgagtagctgggattacaggcaagtgccaccacgcctggctaattttgtgtttttagtagagacagggtttctccatgttggtcaggctggtctcaaactcccaacctcagatgatctgcccacctcggcctcccagagtactgggattacaggcatgagccaccgtgcccggccacacgcttggcttcttaatcgtagggatttgcagttcagcacagttcaggaaacatctgttggcgtctcttggggactgaccaatgtgggcaattgttgaagctcagtccttcaggggatctctaagacatggtgtggaatgaggttgagagttgcgccacagagggactaggagttgggctctatccacctgccctgttggtggttggtggacggctgctttcatggacattaacatatagactggctgggcgctgtgtctcactcctgtaatcccagcactttgggaggctgagggggggtggatcatttgaggtcaggagttcgagaccagcctggccaacatggcaaaaccctgtctttactaaaagtacaaaaattgaccaggcacggtggctcacacctgtaatgccagcactttgggaggccggggcaggtggatcacctgaggttgggagttcgagaccagcctggccaacatgaagaaacctcatctctactaaaaaagcatacaaaaaattagccgggcgtggtggtgagcacctgtaatcccaactacttgggaggctgaggcaggagaattgcttgaacctaggaggtggaggatgcagtgagccaagattgcaccactgcactccagcctggacattaagagcaaaactccatctcagaacaaaacaaaaaacaacagcaacaaaaacaaaagcccaaaaattagccgggtgtggtggtgggtgcctgtgatccctgctactagggaggctgaggcaggagaatcacttgaacccgggaggtggaggttgcagtgagccgagatcatgccattgcactccagcctgggtgacagatcaaaactccatctcaaaaaaaaaaaaaaaaaaagaaaggaatcatggtggtgcatacttgtactcccagctacttgagaggctgatgtgggaggatcatttgagcttaggaggtggaggctgcagtgagccaagattgcaccactgcactccagcctgagtgacagagccaggccctgtctcaaaaaaattaaaaaataaaaaaaaaaagaaaagaaaagaagaagaagaatcatcccaaatcccaaagctccacatttctgaacctcatgacctgtggtcttcatgagttctcaaggtaccaaatacaacaacgaaagatactcccaaatccttggggttgtttttctttttctcaagcctctttgcagatattttgttttgttttttgagacagggtcttactttatctctcaggcgggagtgcagtggcacgatcatggctccctgcagcctcgacctcccgggctcaagacgtcctctcgcctcagcctcctgagtagctgggactacaggcgcatgcccccatgcctggctaattattattattattattttgtagaggtgggggtctcactatgttgcctaggctggtttcaaacttatgggctcattcagccttccaaagtgctgggattacaggcgtgacccactgtacctggccagaatttgttttttaccttttttttttaactgtttttttgttttttggtttttggttgtttttttttttgagactgagtcttgctctgtcgcccagactggaatgcagtggcgcaatctcggctcactgaaacctccacctcccagcttcaagcgattctcctgcctccgcctccccagtagctgggactacgggcatgtgccaccacgcccggctaatttttgtatttttagtagagatggggtttcaccatgttggccaggatagtctcaaactcctgacctcgagtgatccacccacttcggtctcccaaagtgctgggattacaagcatgagccgccacacctggccaacttttatgtttttaatttaaaaaattttttagagacagagtctcagtctgtcaccctggctgcaatgcagtggcacaatcatagctcactgcagcctccaactcctaggggcacaagtgatcctcctgcttgagcctcctgagtagctgggaccacaggggtgtaccaccatgcccagctaaaatttttattaagagatggagtcagctaggcatggtggctcacgcctgtaatcccagcactttgggaggccaaggtgggcggatcacctgagatcaagagtttgagaccagcttggcccacatggtgaaaccccatctctactaaaaatacaaaaattagccgggcatggtggcaggtgcctgtaatcccagctacttgggaggctgaggcaggggaattgcttgaacccgggaggcggaggttgcagtgagccaagatcataccaccgcactcctgcctgggagacagagtgagactccatctcaaaaacaaaaaaaataaaaattaaaaaattaaaaaattccagacttgtaacccttaacccgtggaagtgcctgacaggcatccctggttctgcacaggtttcctccaaaggggacagattgctggagaagcttccagatgctgtgaggttcctggtggtctctgaagatgagtccctcctcgccgcaggtagcgtttagctctcatttggagtagtgaggaagctaatcaggatcaggttggagaagggggtggggcttgggaacagagagaagtcctagggccagaggttagcaacgttttctgccaaatggcctcatagtaaacattttttgcagtccagacgagacaacctcagttgcaaagactcaactctgcagttgtggtacataaactagcatagacactatttttctattatttttcttttttttttaaatagggtcttgctgtgtcacccagactggagtggagtggctcaatcataattcattgcagccttgaatttctgggctcaaacgatcctcccacgtcagcttcctgaatagctgggattacaggcacacaccaccacacccagctaatttttgtatttttagtacagacggagtttcaccatgttggccaggctggtctcgaattcctgacctcaggtgattcgcccaccttagcctcccaaagtgctgggattacacaggcgtgagccattgcgcccagccctttctttccttttgatgcaggatttttcttggcctctttgccaagctgggagcagggggcaccccatttattcagcctgtggggtcacatctggcttttggcccagcccgcggctcccatggccactgccacgactgagcactcagcccctagcaggagggagcatgtgagcaagtgaatgtagggtccagctggctgcttcaagcactgacacagggccaggctccatgcagggcccatgggcagaccaggccatgtgtcaccccaaaggaaacacaaggggtccacgaccctgaagccccagagggggtgttacagtgtgctaattacctttttttttttttttttttgagaccgagtctcgctctattgcgtaggctgtagtgcagtggtatgatctcagctcactgcaacctccacctcccgggttcaagcgattctcctgcctcagtctcccaagtatctgggattacaggcacctgctaccacgtcccgctaatttttgtatttttagtagagatggggtttcatcatgttggccaggctggtcttgaactcctgacttcaggttatctgcctgcgtctgcctcccaaagtgctggaattacaaatatgagccaccacacctggcctaatttgctcttttagttccaccatctgcaacccaatggatggtggcatgttagcagttcagtcagcccctttccccattctggcctgcagttctgggactggcttggccccaccactgcttctattgcgtggagcagcttccctctgccatcaaggacagagggccacagtgtcacagccttcctgggtacctgcatccagtgagtcctaagctcttgtcccgtgtccaagaagaatgaggtcatgctgacaattgaaaagtgataaggacagagaattttattgagcaacaaaacagctctcaggggagaggggatgtgaaggttgggtcatctctctcagtgtggctgagtctgggcgtttttataggcacaggatgggggaggggcaggtggtaggtagtattggaaaacgtaacattcaattggttaaaaagcattattcaggccaggtgcagtggctcacgcctgtaattccagcactttgggaggccaaggtgggccatcacctgagatcagaagttcagatcagtgaacttctgatctgaacttctgatgatcatggtgaaaccctgtctctactaaaaatacaaaaattaactgggcatggtggcaggcgcctgtaatcccagctactcgggaggatgaggtgggagaattgcttaaacccaggaggtgaagattgcagtgagccaagatcatgccactgccacaaaagtcttattcagaaagaatcaatcaggaaagggtgggcaaacaggaacaggagttctcactctgggttgtggatttcatttggaaacagcagcccaggctgtttttggttcaaaggtacagtttcactggggacccattcctatctgcctaggcatttgcctgcctcctgccgctatcccttcctttctcccttcttactttctttcctcttcttccttccttcttccccttctcatttctctccttcctcccttcctctttacttttcttcctctctacctccttgactctcctctctccttcctcccttccttccatcatagttatcaaaggcctgctgtgtgcccagctttgtgctagtttctgagataccatgatgagccaaataggcagtccctgccctccaggaacttacagtttcattataataactttacaagtttccttaagatgagtgattactggctgggtacggtggctcaggcctgtaatcccagcacattggaagtccgaggtgggcggatcacttgagatcaggagtttgagaccagcttggccagcatggtgaaacctggtatctactaaaaaatacaaaatttagccaggcatggtggtcagcacctacaagcccagctactcaggaagctgaggcaggagaatcgcttgaacccaggaggcagaggttgcagtgagccaagatcatgccactgcactccagcctcagtgacagagcgagactccatctcaaaaaaaaaaaaaaattgatgagtgattacagaagtcaggccctcccccaaccagctgtgggctatgtgcagatggggacaggactgaatccaccttccccgtcctggatcccttctcctggcacctagcaggggttccaaaacatctcttttttttttttttttttttgagacagagtctggctctgttgcccaggctggagtgtagtggtgcaatctcagcttactgcagcctctgcctcctgggctcaagcaattctcctgcctcggcctcctgagtagctgggattacatgcatgtgccaccacacctggctaatttttgtatttttagtagagaataaaatacatgaaacatcggggttcaccatgttggccaggctgatctcgaactcctgacctcgagtgatctgcccgccttggcgtcccaaagtgctgggattacaggcatgaaccaccacatccggcctccaaaacacctctgttgatggaaggaatgaccctcaatctcctctggacatgagaggtgtaaccccagttcctgccgtttcaggctttggaagatcggtgcggatattcttggcggactcgaggggctttcgccgattcatggccatggatctggaacatgaagacatggtggagacggctgtttttggtactgagaacaacctgatcatcacggggtcccttgatgcgctcattcaggtgaggggagatctgggacccttcatcctcacctccacctcgggaacagacactgattctttagggatttttggctgcaaaatacagacacccacaaaaatgagtgcaggcaaaataggtgagttcattgggaggatatgggggtgtatcctccgccccagtggcagacctgggtgagaattactgaaatgttcaacaaaggaggtagcattcccaaactgatcctcaaaccttgggggcagatttgtgccttcagagtggagcagggttgtgggggaggaaaattctcaatttaagttcaaagttgtccaagctggagagaaaagtagatggtgaaatagcagatcttcagtgttttagtctcaggcctcttgaagttctctttttttccccctccttcttatgagctattttttccagttttaaagaaattgataaatagactgtgcacagtggctcatgcctgtaatcccagcactttggaaggccaaggcaggtggatcacttgggcccaggagttcgagaccagcctgggcaacatagcaagacccaatctctacaaaaaaacacaaaaattagccgggcgtcatggcatgtgcctgtagtcctagctactcaggaatctgaggtgggaggatcacatgagcctgggaggtagaggctgcagtgagctgtgattacgccactgcacttcagcctgggtgacaaaacaagaacctgtctccaaaaaaataagaataattttctttattttttgagaccaagtctcactcagtcgcccaggctggagggcagtgtggcatgatctcagctcactgcaacctcgacctcctgggttcaagcaattctcctgcctcagcctcgcaagtagctgggatttcaggcacccaccaccatgcctggttaatttttgtatttttagtagagacggggttccgccatgttggccaggctggtctcaaactcctgacctcaggtgatcagctgccttggcctcccaaagtgctgggattacaggcgtgagccaccatgtctggctagaataaaataattaaaaaaaaaaaaacattaaaagttttgagcttccagaccctctaaaaaaggtttacagggcaccctctaaaaaaggtttacagggcaccctccaggagttccctggaacacactttgggaactgctctggaagctgatgggttcaagcctgagtaagttaaaggaatgggaagatgtgaaggcccttgaacttacagcctgaaaattcaccttaggtttatgaatgggctgaagtgtatttcttattttcttatttatttatttttatttttattttgacggagtctcactctgttgccagcctgaagtgcagtggcgcaatctcagctcactgcaatctctgcctcccaggttcaagtgagtctcctgcctcagcctcccgagtaactgcgattacaggtgtgcaccaccacgcttggctgatttttgtatttttagtagagatggggtttcaccatgttggccaggatggtcttgatctcctgacctcatgatccacccgcctcagccttccaaagtgctgggattacaggtgtgagccactgcacctggcctatttatttatttttatttttattttttttgagacggagtttcattcttgttgcccaggcttgcgtgcaatggcacgatcttggctcattgcaaactccacctcccgggttcaagcgattctcctgcctcagcctcctgagtagctgggattacaggcatgcaccaccaagcctggctaattttttgtatttttattagagatggggtttctccatgttggtcaggctggtctcgaactcctgacctcaggtgatccacctgcctcagcctcccaaagtgttgggattacaggcgtgagccaccgcgcctggcccaatgggctgaagcgtatttctgaactatagttgtccacagaagatgtcagatctgccctcctgttctgcttcctcaggtgtggagtctgtcagaacaggggacccttctggacatcctggaaggcgtcggggcccccgtgagcctgctggcccgcggcggggctttggtggcatctgcttccccacagtcctcatctttcaaggtctgggatctcagcgatgctcataggtcccgggtgcctgcaccatttctggaccgcaccggcctcaccgcagtgtcccacaatggaagctacgtctacttccccaaaattggggacaaaaacaaagtcactatttgggacttggcagaaggttggtaaggtataagtatggtcatttttgtgggtaaggcttggagccatctgtcttagtttaggctactgtaacaaatcatccccacaggctgggccccatggctcacgcctgtaatcccaggactttgggaggccttggcgggtggatcacctgaggtcaggagttcaagaccagcctggccaacatggcaaaaccctgtctctactaaaaatacaaaagttagccgggcatggtggcacatgcctgtatccccagctacttgcgaggctgaggcagaattgtttgaacctgggaggcgaagactgcagtgagccgggatcctgactctgcactccggcctgggcgacagagtgagactctgtcccagaaaaataaaataaaataaattatccccatagactgggtggcataagcaagaaacattattcctcaacattctggaggctgggaagttccagatcaaagtgcaagcagatctcgtgtctggtgaggacccgtttcctggttcacagatggccatcttcttgatgtgtccccagagagagagagaaatctcttgtgtctcttcttataagggcactaatcctattcaggaacgccccacattcatgatctaatcacttccctgtcactctgctacagttcggaggtttggccctacaaaccagatgttggcatttaatatccggctggccatggtggcttaaacctataatcacagcactctgggaggccgaggcagtaggattgtttgagcttagggttcaagaacacctgggcaagatgagaggatgccatttctactaaaaatttaaaaaatagctggatgtggccagtcatggtgggtcacacctctaataccagcactttgggaggccaaggcaggcagatcacttgaggtcgggagttcgagaccagcctgaccaacatggaaaaaccccacctccactaaagcaatacaaaattagctgggcgtggtggtgcatgcctgtaatcccagctactcaggaggctgaggcagaagaatagcttgaacctgggaggcagaggttgcagtgagccgagatcacgccattgcactccagcctgggcaacaagagcaaaactctgtctcaaaaaaaaaattagctggatatggtggcatgtgcttgttgttctagctattttgggggctaaggtgggaggatcgcttgagcctgggaagttgaggctacagtgagtcatgatcgcactactgcactccagcctgggtgacagagtgagaccctgtctctaaaaacaaacaaaaaagccaggcgtgatggctcacacctgtgatcccagcactttgggtggctgaggtgggcggatcacttgagctcaggagtttgagaccagacgtctctacataaaagacaaaaattagctcggtgtagtggctcacatctgtagtccaagctacttgggaggctgtggtggtaggatcacttgagcccaggaggcagaagttgcagtgagctgagattgtgccactgcactccagcctggacgacagaacaagaccctgtttgaaaacaaaacaacaataaaaaaagaaatttaatccccagtgttggagggaggcctcacgggaggtgtttgagtcataaggacacatccctcgtggatagattaatgccctctcctggcaaggcagtggtggtggtgagtaagttctaactctgttagttctcgcgaggttgttaaaaagaacctgaccccagctactcaggaggcagaaacaggaagattgcttgaggccgggagttcaagaccagcctgggcaacatggaccttgtcgcaataaaaataaaaataatggccgggcatggtggctcacgcctgtagtcccagcactttgggaggctgagttgggtggatcacgaggtcaggagctcaagactagcctggccaacatggtgaaaccccatctctactaaaaatacaaaaattagccggacgtggtggcgggcacctgtaatcccagctgttcaggagggaggcaggagaatcgcttgagcccggcaggcagaggttgcattgagcaccattgcactccagcctgggtgacagagcaagactctgtctcaaaaataaataaataaataaaaataaaaataaaaataatgagctgggcatggtgatattcacctgtagtctcagctacttgagagatggaggcaggatgatcgcttgagcccaggaatttgaggctgcagtgaactgtgattgcaccactgcactccagcctaggtgacagagcaagaccctatctcaattaaaaaaaaaaaaaaaaaaaaaaggaagctagcacttccctctctcttgcttcctctggccgtatgacctctgcacaccccaacccccttcaccttttgtattaagaagaagcagcctggggccctcaccagaagcagaagctggcaccatgcttcctgtacagcctgcagaacaatgagccacataaacctcttattcataattatgcattactgtattagtctgttctcacactgctaataaagacatacctgaggccgggcctgctggctcacacctgtaatcccagcactttgggaggccaaggcaggcgcatcatttgaggtcaggtgttcgagactagcctggccaacatggtaaaaccctgtctctactaaaattccaaaacttagccagaaatcgcttgaacccaggaggtggcaattgcagtgagccaagatcttgctactgcactccagcctgggcaagagtcagactctgtctcaaaaaaaaaaaaaaaaaagacatacctgagactgggtaatttgtaaaggaaagaggtttaatggactcacatttgcacatggctgggaaggcctcacaatcatggcagaaggcaaatgaggagcaaagtcacgtcttacatggtggcaggcaagagagtgtgtgcaggggaattgccctttacaaaaccatcagatctcatgagacttattcgctaccacaagaacagtatgggggagactgcctccatgattcaattatctccagctggcctcggccttgacctgtgggaattattgcaattcaaaatgagatttgggtggggacacagccaaaccatctcagttacccagcctcaggtagtccttcatagcaacaccaacagacttagacaggccccagctcctaataccatcctatggggagtgaggattttgacataggaatttggtgggggggtggggacacaaatcttcagtccataacattcctataacttcaatcaggtagaaagtagctagtcaaaaacaggttttcattagcaacaccaatgaactaagacaggcccaagctcctgataccattccacagagggtgatgattttaacataggaatttgtcagggggacacaaatcttcagtccataacacgcctataacttcaatcaggtggaaactagctagtcatggccaggtgtggtggctcacacctgtaatcccagaactttgggaggctgaggtgggcggatcatttgaggtcaggagttggagaccagcctggccaacatggcgaaaccccaactctacttaaaaaaaaaaaaaaaaaaaattatctgggcgtggtggtgtgtgcctgtaatcccagctactggggaggctgaggcaggataattgcttgaacctgggaggtggaggctgcagtgagccaagaccatgccactgcactccagctttggcaacagagtgagactccaccacccgaaaaaaaaaagaaaaagaaagtagctggtcaaaaacaggatttcattttatacattttctgcatgaggtagttggcaatctggttgtttccgtttggcctgttttaattcaggttacctagaagctgaatctgtgatgaggatatttgcacaagtgatgtattgaggggtgtttccaggagaaccccagagggagatgagaaaatggggctggcgggggaaagggttgagcaagaatgcaggctcagctaaagtccctctcagcatcattccatggggagccctggaagaggtagagcaccagtcttagtcaattccggccactataacagaatgccatggattgggtggcttagaaagaatagcaaatggggccaggtgtggtggctcatgcctgtaatcccagcactttaggaggctgaggagagaggatcacttgaggccagaagttcgagaccagaagtttgagaccagcctgggcaacatagtgagaccccacctctacaaaaaaatttaaaaggtatcgggcttggtggtacatgcctgtagtcctagttactccagagtctgaggcaggaggattgcttgagccgtggagttcaaggctgcagtgagctatgataatgccactgcactccagcctgggcaacagagaccctgtctctctgtttttttttttaatttaaagaaagaatagaaatttgtttatcatatttctggaggaggctggggagtccaagatcaaggtgccagcaactttgttgtcttgggttaaattaatttttttttaaatttggtatctggtgagtgtcctctttctgggtcatggatggccagattttctttgtcctcacatggtagaaaggggcaaagaagctccctggggcctcttttttttgttgttctgtcttatttaagagtcagggctcactctactgtctaggctggagtgaagaggtacaatgacggctcagtgcagcctcgaactcctgggctcaagcgatcttcctgcctcagcctcctgagtagctggaaccacaggtgcaccaccatgcctgactcctggagactttaaaatttttaaaaatatttatttatttatttatttttatttttattttattttatttttgttgttgttcttttgtttgagatggagtctcgctctgtcacccaggctggagtgcagtggcgtgatctcagttcactgcaacctccgcctcccgggttcaagcaattctcctgcctcagcctcccgagtagctgagattacaggtgtgcagcacaatgcctggcttatttttgtatttttagtagagatggggtttcaccgtgttggccaggctagtctcgaactcctgacctcaagtgatccacctgcctcggcctcccaaagtgctaggattacaggtgtgcaccactgtgcccagccaaattttgtgtgttttgtagagataaggtctctctatcttgcccagggtggtcttgacctcctgggctcaagcaatctgcctgcctcagcctcccaaagtgctgggattagaggcgcacaccaccatacctggttaatttttttaatgtttttgcagaggcaggggtctcactcttttgcccagactggtcttgaactcctggtctcaagccatcctctcacttcagcctcctgaatagatgggattacaggcatgagccactgcacctggcatctctccatttccttgggccctggttcaccctgcaaccagcaaacaagcacctcgagaattgtaacctcacttgatttgctccctgccaacccccagagctttgcctagtgggctgttactctaaaaatgtttgccaaattaacgactgaatgaagttgagaatcagcttgaaaatcaggattcctttctcctattatttcatcattaacaaggagtttcttttttctttttctttcttttcttcttttttttttgagagggagtttccatctgttgcccgggctggagtgcagtggcgtaatcttgacacactgcaacctccacctcctgggttcaagcgattctcctgcctcagcctcccttccaagtagctgggattacaggtgcctgccaccacgcctggttaatttttgtatttttggtagagacagggttttgccatgttggccagactggtctcaaactcctgacctcaggtgatccatccacctcggcctcccaaagtgcttggattacagacgtgagtcaccacgccctgccattaacaggagtttctatacctctatcctcccagcaggactgtgccaagtactgttggtgagaaactcagaaatccctcactgtccaattctcgcagacccagcagtgcccccaccttcattttactcctgggaattgcccactgatgaaagaagcctctcaactggaaatggcagggggatgtggccaccgcccctgaaatggccccagtcaatgactgcctgatgtgggaatacaaaagtctggcccccttgcttcaagatgggacaattcatggtggctcatgcctgtaatcccagtactttgggaggcaaaggtgggaggatcgtttgagccctggagttcaagaatagcctgggcaacatggtaaaatcccatctctacaaaaattagctgggcgtggtggcccgagcctgtagtcccagttacttggggggctgaggtgggaaaatcactagagcctgagaggttgaggctgcagtgagccatgttcgtgccactgcactccagcccgggcaacagagtgagactccgtctcttaataaataaatacataaataggctgggcgcgatggctcatgcctgtaatcccagcattttgggaggccgaggcgggcggatcacttgaggtcaggagttcaagaccagcctggccaatatagcgaaaccccgtctctactaaaaatacaaacaaattagctgggcgtggtggtgcgcacctctagtcccagctacccgggagactgaggtgggagaattgctggaatctgggaggcagaggttacagtgagccgagattgtgccactgcgctccagcctggacaacgaagccagactctgtctaaaaaaaacaaaaaataaaaaaattagtagggcacagtggcaggcgcctgtagtctcagctactcaggaggctgaggcaggagaatcacttgagtccaaaagttggaggctgcagtgagcttcagtctcgccactgcactccagaatactgtctcaaaaaaaaaaaaaaaaagaaagaaagaaaatatgaacaccaggccgggtgtggtggctcacgcctgtaatcccagcactttgggaggccaaggtgggtggatcacctgaggttgggagttagagaccagcctggccaacatggagaaaccccacctttactaaaaatacaaaattagctgggcgtggtggcacacacttgtaatcccagctactcgggaggctgcggcaggaggattgcttgaatccaggaggtggaggttacggtgacctgagatcgtgctattgcactacagcctgggcaacagagtgagactccatctcaaaaacaaaacaaaacaaaaaaaaccaccagggaagcagggctgctgtgattcactctcagtgtaagtcattctcatttttcttccctggcaggcgaggaacaagattccctggacacctccagtgagatcaggtgtctggaggttgctgagcagcgcaagctcctatttacgggcctcgtgtcgggggtcgtccttgtgttccccctgaattccaggcaggacgtgatatgcattccccctcccgaggcccggaaagcaatcaactgcatgtccctgagcaagtgcgaggaccgcctggccatcgcctatgacaacatcgtcctggtgctggacatcacctccggggacccctgcccggtcatcgatgggccaagatacaccttttacactcagctgcccgagaccctctccagcgtggccattctgacggactaccgcgtggtctacagcatgaccaatggggacctctttctttacgagtgtgcaacttccaaagcgtttcccttggagacccacaggagccgagttgcctgtgtggaggtcagccacaaggagcagctggtggtcagcgggtctgaggatgccctgctgtgtctctgggacctgcaggcacgcaagtggaaattcgagatgagctacacggtgggtggcccgcctccccatgttcatgctagacccaggcattggaaaactgatagatagccatcatttactaagcacacaccatgggccatcgaccaggatgggactggggtgatgaaaatgaggcacttggtcaggcgcagtggctcacgcctgtaatcccagtacttttggaggctgaggcaggcggatcacctgagatcgggagttcaagaccagcctggccaacatggtgaaaccccgtctctactaaaaatacaaaaattagccaggtgtggtgttgcatgcttgtaatctcagctacttggggggctgaggcaggagaatcgcttgaaattgggaggcagaggttgcagtgagccaagatcacgccactgcactccagcctgactacagacactccgtttaaaaaaaaaagaaaagaaaagaaaagaaaagtgaggcatttgtctcagaagcaaagttttttttgttttcattttttttttaaagagacagggaccccactgtcacgaggctgtagtacagtggcacaatcatagctcattgcagcctcaatctcctgggctccagtgatcctcccgcctcagcctcccaaagcactgggatttcaggcatgacccaccggacctggctacaaagttcaaaggagtaccaaaaagctcagcaatggtaggccaggtgcagtggctcacccggcactttgggaggcccaggaaggaggatcacttgaggccaggagctggagaccagcctgggcaacatagggagaccttatctctacaaacaaatgcaaaaattagctgggcatggtgatgtgcacctgtgatccagctacttggagggctgaggcggaaggattgattgagcccggatgccactgctctctagcctgggtgatagagcaaggcctgtctcaagaaaacaaaaaacaaaaactcagcaatgaagataaataattttttttttttgagatggagtcttgctctgtcacccaggctggaatgcagtggcgccatctcagctcactgcagcctcccgggttcaagcaactctcccgcctcggcctcccaagtagctgggattacagataagcaccaccatgcccagctaatttttgtgtttttagtagagaaggggttttgccatgttgtccaggctgaactcctggcctcaagtgacctgccttggcctcccaaagtgctgggattacaggtttgagccactgcacctggccaagaagtaatattttaatgcaatatttttaaaaatctaaaatgaataccaaaattccatgaagaacaaaatctcaacattataggtaaaaactggatcaaatcctgcactggcttagtgctgcttcactctcttcaccctaatcctggctctgtgctatttctttttttttttctttttctttttctttttttttttttgagatggagtcttgctctgtcacccaggctggagtgcagtggtgcgatctcggctcactacaagctctgcctcccgggtttatgccattctcctgcctcagcctcccgagtagctgggactacaggtgcccgccaccacgcctggctaatttttttgtatttttttggtagagatggggtttcaccgtgttagccaggatggtctcaatctcctgacctcgtgatccgcccaccttggcctcacaaagtgctgggattacagtcatgagccaccgtgcctggctgctccgtgctatttctttatccaactgatacttattgaaaaacctctgccaggacccctttctatcacaagggttgcttttctatcacccctttctatctgcctggtcacagggagactctatcccatgtcttggagccactttgtagttgggaagacacagtgagctctgtctgggcaaaaggatttttttgtgtgtgtgttttgctcactgaagtttcccttgttcctaggagaactcctgacatttccttgatgctcaataaatggcaagggctgctgcttaagaaagccatgtaaggctgggcaccatggctcacacctgtaatcccagcactttgggaggctgaggcgggtggatcacctgaggttaggggttcgagaccagcctagccaacatggtgaaaccctgtctctactaaaaatacaaaaattagccctgcatggtggtatgtgcctgtaatcccggctacccgggaggccgaggcaggagaatcactggaacctggaaggcagaggctgcagtgagccgagaacacgccactacactccagcctgggcgacagagtgagactccatctcaaaaaaaaaaaaaaaaaaaagaaagaaaaagaaggccttgtaagtctagattaggcacagcaactcatgcctgtaatcccagcactttgggaggccgaggcagggggattgcttgagctcaggatttcaagaccagcctcagcaacacagcaagatcccatctctagaaaaaaaaattagccaggtgtggaggtgtgtgcctgtagtcccagctagttaggaggctgaggtgggaggatcgattgagccctggagttcgaggctgtagtgagctatgatctcgccactgcactccaccctggatgacgatacaagattctgtctctcgagcaaaactaactaataaacaaaaatgaagaaattaacatgtgaacagtactattaattaaactgtcaaccttatgggaattttttattttttgttatttattcatttatttatttttgaggcagggtcttactctgtgagccaggctgtagtgcagtggtgcaatcatagttcactgtagcctccgcctcctgggttcaggtgattcttccacctcagcctcctaagtagctgggactacaggcatgtgccactgcacctggctaattttttaattttttgtagagacagggtttcacccacccaccttggcttcccaaagtgctgggattacaggtgtgagctatcacatccagcctttattggaatcttaccagcttttcaattcattccttttttccattctagaatccaatccaggattccatgtgagattagcacatagcttttaattaaatacaatcatagctaacatccgtataaccaaagtaatttaagaaattgaatccccatcgaaaaaagaaattgaatcctatggccaggcacagtggctcatgcctgtaatcctagcactttgggaggctgaggcgggtggatcacttgaggtcaggagttcgagaccagcctgaccaacatggtgaaacctcatctctcataaaaatacaaaaattagccgggcatggtggtgcatgcctgtaatcccagctacttgggaggttgaggcaagagaatcgcttgaacccaggagatggaggttgcagtgagccaagatcgtgatattgcacttcagccagggcaacaagagcgagactctgtctcagaaaaaaaaaaaaaagaaagaaagaaagaaaaaagaaaagaaaagaaaaaagaaattgagtcctacaattgttcctttcagtgcaaaatgtatctaaacctttctatccaatctctatggaggtgtgcctgggttggggtagtatctgtgctgctcatctctccaggttttcattggatccatccccctgtggggcgcttcaaagcctggttctgaggtcaggagtttgggaccagcctggccaacatgatgaaaccccttctctactaaaaacacaaaaattagttgggcatggtggcaggagcttgtagtcccagctacctggaaggctgaggcagaggaatcgcttaaacccaggagacggaggttgcagtgagccgagatcaggctactgcacctcagcctcaggaacagagcgagattccatcaaaaacaaaaacaaaaaacaggcatagtggctcatgcctgtaatctcagcacttcgggaagccgaggcaggcagatcacttgaggtcagttcaccaccagcctgggcaacatggtgaaaccctgtctctactaaaaatacaaaaattagccaggtgtggtggcacacacttgtaatccctgctacttgagaggttgaggcaggaggatagcttgaaaccaggaggtggaggttgcagtcaagccgagatggcatcactgcactccagcctgggtcagacctgttaaaaaaaaacaaaaacaaaaaaaaggcctggttccttggggctggtttcctgggtgtctttcagtttggaatcaagatcatattgtctgggtcaggcacgttggctcacacctgtaatcccagcactttgcgagaccaaggctagtggatcacctgaggtgaggagttggagaccagcctggccaacatggtgaaaccccatttctactcaaaatacaaaaattagccaggcatggtggctcatgcctgtaatcctagctacttgggaggctgaggcaggagaatcgcttgaacctgggaggtggaggttgcagtgagctgagatcacaccactgcactccagcctgggcaacaagagtgaaactccatctcaaaaacaaacaaacaaacaaacaaacaaacaaaaaacccaagaaaaagagagatcatattgtctgttttcaacagagttcttactgcagaggggtccaatgtgcttgcttctccaaggatgacaagtatgtgtacgtgggcttaaaggatcgctctatacttgtttggagtgtgctggatggtgagtcattttgcttttagggcaggattgagcttcgatctggagagaaaaggctctgacctgggtcctgggcattagagggccctgctctggccacctctagctgcatcccttagcttttaggaaggtgtctgcaggcaaaggcaaagggcccacaatccctcttctagacccatgctctggagttcgagaactccctcccttgagttttcattagggcatgcacaggcttcctgcatacagccatccttccgaggatagactgggctcctggtgtgtgcacttctgggctcaggagtagccatggggtggtatggatggagtttgggtgtctgagttggttgtgagatggagctgagaagagtgagaagagggtcaagtcactagtagtggggggctggttacatcactacattccagcatagaaccctgaggagcccaagaattctcaatctgtttccaggtgtttgtgaaggttccttcatcaatataagaggacacagcatattctatttaatagtttattccctagaattgcaatgtttatatatggtgtcttcttggatgtgggtcttatttcattctttgcccccgccttatagatgttagaagcagcctgtttttgttttttgttttttgtttttgagatggagtctagctctgtcacccaggctggagtgcagtggtgcaatctcagctcactgcagtctctgcctcccaggttcaagtgattctcctgcctcagcctcctgagtagctgggattacgggcgcccaccaccacactcagctaatttttgtattttgagtagaggtagggtttcaccatgttggccaggctggtcttgaactcctgaccttgggtgatccacccacctcggcctcccaaagtgctgggattagagatgtgagccaccattcctggccagaagcagcctgttttaagaccaaccactttggaaacaccgtgtctcttggtctgttcagtattatgctaaggtcttagcaagagttaacactggctgggtgcagtggctcaagcctgcaatcccagcactttgggaggccgatgtaggaggactgcttgaggccaggagttcaagactagtctggacaacatagcgagactctgtctctacaaaaaaaaaaaaattaaaaattatccaggcatggtggtacatgcttgtagtcccagctactcaggaggataaagtgatcatgggaggtcgaggtgtgggagattgaggctgcagtgagccatgatagcaccattgcactccagcctgggcaacagagtgagaccctgtcaaaaaaaatgagttaacattttttgtatactgggtactgtccttaagtcatttaactctctcaacactcactcccatttacagagcaaaaactgaggctctgagaggctggcagacttgcctaaggtcacacagtgagtaactagtaggcttaggtttgaggctgaccttcctgatttcagtacgcctttgtcactttcttacactgtctcctatagaaaaggcgctcattgtgtattatctctttgaacccttatgacactagtaggagataagtatcattgctatccttgtttgacaatgaagaagctgaggatcagagaggttaggagacttgcccaaggtcacaaaacaagtaagtggctgaataaatatcaggtggagcctactacattgtagttgaatacactgtaatctgatacatagtaaactataacactattatacattgtagtataatatgctgtagcaaagatatatacaactggtataaagttacagatggctcagaagatgaaggttgaggactgtggccttaaaagcccatcctgggccagttcacaacctctcttccttctcctccttcaacaataatatttactgagctcactctgggccaaaaacctacactaagcacatgacctgcatgatgcctttcaatcttaaaaatcgccctgagcaggtgtaggttctgttatcattcccattgtgcagataaaggaagagggactctttggcataataaatgtcatgccaaaattagtagagggcatagcaggaattttattccatgcagccaactctggaatgtgtaggattggacctctacaccccatttttctcatttgtgtccttctcttcacccttacaggcaccctgctgacagtccagtttgtccatgctgtggtaaacagaatcatcccaaccaccagtggcttcattgcccccaccaggcatggttatctgatccgagagaatttccagtgcctttcagcaaaagcctcaccgcaggaccctcttaagaacttcaagaaggcaatgtggatggtcaaatccaggcagagagaggagctagttgcagctgcaggagctccccaggacttggagtcagaaagtgcccagggaaatgaaaccaaatcaaacaaatgctcacaagtgtgcctgatagtgtaaaaaaataaaaataaaaaaaccctgtgggggtatggggctccagtgagttagccccatttaatctagttaaagcaaaaagaatacgtttgctggtgtatatctggacccatggcttcagattatggcttcagaccttgtctcttctcatctttccattattctttcctctttttcattttcattctcagacttgccacccccaggttagcaacatggtggccaatatgctgctgtctccaatttcaatagaaaagagagcttctctttcccaacagtcctagcctcaactctactggtcccaattggcccatacgcctagccctaaaccaattattatatctgggagaatgcagagctctaatcggctagactgatccaatgtccaccactgggactgagaatagaagagattactcctgagatgcaaactggagttctggtaccagatgaagggggaacggatgaatgtgagatacagcaaatcactgatgtggaccacagaacctcacagtttataaagctgtaggtgctgtcatctgatcctcatcacaactcatactttagggagggcaggagtttctgtatctattttacagatgaggaaactgagccttgcggaagtagttataatttgattcaggtcacaagtccaaggtgcaagagctctgagagtgagccttctgtcccattcctgttagacctcactccaatttcagtctgcagagcacaaccatctcttccacaggcaccacactcaaatgctcacaggagctagtgactaatctagacacttccatgcacctgggtgagcagcagggagagacagagactggacatgtggaaggcagagattgtgtctagggtgggtatgagcagcctgactgtagcccagaatcaccatggccaaacaagcccactgctgtcagtgcttccagttgtaataagcaaagccagaaatccagacttttatgcaaaaatgttctgacttttaaagttggcgattggttgaatttatatctatagtgcatttggcatgtgcgtctttggttaatgagctgacttcaggactcacgctggcagtaaaacaatcaacatgttatagttcatccctctctattccttggctcccaaacttttgggataaagatgtgggtttttaatcttaaaaactggaggctcttggaagtagaaagagctgctgatctctccctgctttgcttttgaactgtctgccttgtgcaagttcaacagtcaaactgttttcattccacttaagtggatctttcttctttgcccacagccttctaaaagcccttctcagtcttctcaggcttttactttaatgctaggatagtctaaatcttcaaggtggctatcccttctcccctccgtggaattcctgatagagtctcaataaaagcaaccttagaaacagaggcttttgagctgaacaagaccctactgctgtcttattcatccattttccaaaccagttttccaaggcaggttttggtagttctgcaaatgttagtgtcaaatttcatttaaaaatattttaaactgtaattttaagatgtatgcttggatgtattgggcagcagcttctaaggtgttgaagattactaaggttggtgcaaaaagtaactgtggttttcgccattaaaaatattaaaaataatggcaaaaactggctgggcacagtggctcacacctgtggtcccagctctttggaaggccgaggcaggtggatcacctgaggtcaggagtttgagaccagcctggacaacatggtgaaacccttctctactaaaaatacaaaaatcagccaggcatggtggtgagtgcctgtaatctcagttactcaggaggctgagtcaggagaatcacttgaacccgggaggcggaggttgcagtgagctgagattgtgccactgcactccagcctgggtgacagagcaagactccatctcataataataataataatggcaaaagcctcggtggctcacgcctgtaatcccagcactttgggaggctgaggcgggtggatcacttgaggccaggtgttcaagagcagcctggtcaacatggtgaaactctgtctctactcaaaaatacaaaaattagcctggtgtggtgacgtacacctgtaattccagctacttgggaggctgaggcaggagaatggcttgaacccgggaggcggaggttgcagtgagccgagatcgcaccactgcactccagcatgagtgacagagactctgtctccaaaaaaaaaaaaaaaaaaaagtaatggcaaaaaccacaattaattttgcatcaacctaataatttaggattcttctgccattttcatttaactgatttaactgaagagcccaattaaattgtgaagggagccctgaaaaaattagctactctttgccactgcttctctgtgaatcaagggcttacccaatgcagaaataaagtagatgttgagaccaattaagatttcacctacaaattctgattttaaatgcctgtgtccatctccacagcctcagtgagaattgattgttttgtagataaatcctaatttaaacattggaaatgcctttttactaataaaatgctacaacaaattattgcttatattgggagtttttgcagtgtttattcatttgaaaaagagtttggttgctaagaaagtttgacagttggctggtcaatgcttgtaatcccagcactttgaaaggccaaggtagaaggatcacttgagcccaggagtttgagaccctgtctctccaaaaaaaaaaaaaaaaatttttttttaattagctgggcatggtggtgcacacctgcagtcctagctactcagggggccaaggtgggaggatcacttgagcccaggagatcaaggctgtagttagctatgatcgcaccactgcactctagcctgggcaagagagtgagaccatgtctcagaaaaaaaataaaataaaattaagggatgccgaaaagctcagcaatcatgacaaataatgttttctctctcttttttttcttgttttcttttcttttggaagacaaataatattttgttatcttttttttttttttttgtcaaggccttgctctgctgccagactagagtgcaatggtgcgacctcggctcattgcacctctgactcctggattcaagcgattctcctgactcagcctcctgagtagctgggactacaggccaccacgcccagctaatttttgtattttttgtagagacgaggttttgccatgttggccaagctggccctgaactcctgacctcaagtgatctgtgctcccttggcctcccaaagtgctgggattacaggcatgagccaccgtgtgtggcctattatcatatttttaaaaatcaaaatgaatttaaaaatgaatgatgaacaaaacatcaacattctatataaaattggtatctgaccctgcatttgcaggaactgacctcaccctcttcctggccctggggacatcaagacacctcacccctacatacatcagacaagtgtcttaggaaggtcatattcctatataagcacacacacctgtgagaattactaattgttagttaatatcttttttatttttcagagagggtctctctctgtcgcccaggctggagtgcagtggtatgatcatgggtcactgcagccttgaacttatgagctcaagtgatcctcctgcctcagcctcccaagtagctgaaactacagatgtgcacaaccatacctggttaatttttaaatttattgtagagagggtgtctcactatattgcccaggctggtctccaactcttgggctcaagcgatccccccagtgtgctgggattacatggcgcctggccatcagaaatatttctaatctggccctttaccaaaatatatatatatatttaccaaatatatacgtgtctatatatatacatgcacatatatacacatatatacacacacatatatacacatatatatacacatatacatatatacgtatatatgtgtgtatatacacacatacatatgtatatatgtatatatacacatacatatgtatatatgtatatatacacacacatatgtatatacatatgtgtatatgcacatatatacatacacacacacacacatatacttatgtatatatgcctacccttggtcttaaagcttggctaaatttagggtaaacatcttttatataggctttctttttttagagtagttttaggttcacagcaaaattaagtggaaggtgcagagatttcccatctaccctatgcacccctcatgcacagcctcctccatcaacatccctcactctaacaaacgcagagcggtgcatttgttacaatggatgaactcgcattgacacttccttatcagaggagagacaattttttttttttgagacggagttttgctcttgttgcccaggctggagtgcaatggtgcgatctcggctcactgcaacctccgcctcccgggttcaagccgttctcctgcctcagcctcccaagtagctggaattacaggtgtacgccaccacaccaggctaatttttgtatttttagtagagacagggttttgccattttggccaggctggtctgaaactcctggcctcaagtgatccacccgacttggcctcccaaagtgctgggatgacaggcatgagccactgcaactggcccaggatagacatttttgacaagtatacttcataggtgtgtccattctccatcactacttagtaaattattgcaaagttagaagcttaaaataacatccacttcttatcttacaatttctgcaagtcaggagtctgggcatggcatgactggattctttgttcaggatctcacaaggtgtcagccggactgggctctcattgagagcctcagggtcttcatccaagctccttcagattcttggcagaattaagcccttcaaagctataggagtggagacctcagctgcccctctccataggcagtttgcaaaacagctgcttccttcttcaaggccagcagcattgtatttctctgatgcttcatctctgacctcaaactcagactcagactcagactcagattgtcttttaaaaaaatttttttttggccaggtgcagtggttcacacctgtaatcccagcactttggaaggcccaggctggcagatcatgaggtcaagagatacagaccatcctggccaacatggtgaaaccctgtctctactaaaaatgcaaaaaattagctgggcatggtggtgcgcgcctgtagtctcagctactcaggaggctgaggcaggagaatcagttgaacccaggagatggaggttgctgtgagccaacatcatgccactgcactctagcctggtgacagagtgagactctgtctcaaaaaacaaaaaaaatttttttagagatgaggtcttgctgtgttgcccaggctggtctcaaactcctggcctcaagtgatccgcctgcctctcaaagtgctgggattacaggtttgagccactgcacctggcccagtagcacctttttatgtttgataaaaataagaatatccagcctaggcaacttagtgagaccctgtctgtaaaaaaaataaaaataaaaaattagccaggcatggtggcacgtacctgtagtcctggctactcaggaggtcaaggctgcagtgagctgtgattgcaccattgcactccagcctgggcaacagagcgagtacctgtttcagaaaataaataaatggaaataaaattaaaagatgtctttgtactattgtcctcatgataaatatacacatgtgtgcacatacatacatgtacacacatgccccagatggaactggcttgtggttttgtcagaggcgtttgaaacaagcttactccatctagaataggggctgggtaaaatgaggctgagacctgcagggctgcattcccgggaggttaggcattctaagccacagggtgaggtaggaggtggacggaagacccaggtcacaaagaccctgctgataaaacaggattctggggcggggtgggggtcggggggcattgtttgtttgtttgtttttgtttttgtttgagacagagtttcgctcttgttgcccaggctagagtgcaatgaatggcgcgatcttggctcactgcaaactctgcctcctgggttcaagagattcccctgtctcagcctcctgagtagctggtattataggcacatgctaccatgcctggctaatttttgtatttttagtagagacggagtttcatcatatttatcaggctggtctcgaactcctgacctcgggtgatccacctgcctcggcctcccaaagtgctgggattacaggcgtgagccactgcgcccggcccatgcagggtttttgttgttgttgttgttgttgttgtttttgagacagagtcttgctctgtcacccaggctggagtgcagtggcatggtcttggctcactgaaacctccacctcctgggttcaagcgattctcctgcctcagcctcctgagtagctgggattacaggcgcccgccaccacgcctggctaatttttttttttttttttgagtaaagatgggggtttcaccatgttggccaggctggcctcgaactcctgacctcaggtgattcgcccaccttggcctcccaaagggctgggattacaggcgtgagccaccgtgccgggccaggatgcagggttttatcagcatggtgtgaaagtgacctctggttgtcctcactgctcattatacactaattataatacattagcatgctaagagacactcccaccagcgccatgacagttacaaatgccatggcaacttccagaagttaccctataggttctaaaagggtagggacccctaagttctgggaaatcttcgccccttttctcagaaaactcatgagtaatccatcccttgtttaacctataatcaagaaataactgtaagtatatgcaatcgagcagcccatatcactgctctgcctgtggagtagccattcttttattcctttactttctttttcttcatttttaaaatttatttttattttttgagatgcagttttgctctggtcacccaggctagagcgcaatggtgcgatctcggctcactgcaacctccgcctcccaggttcaagtgattctcctgcctcagcctcccgagtagctgggattacaggcgtccaccaccatgcccagctaatttttgtatttttagttgagacagggtttcaccatcttgaccaggctggtctcgaactcctgaactcaggtgatctgccttcctcggtctcccaaagtgttggaattacaggcatgagccactgcacctagccttttttctttttttttgagacaggatcttgctctgtttcccaggctggagagcagtgacacgaccatggctcactgcagccttgacttcttggactcaagcaattctcctgcctcagcctcccaaatagctgggactgcagacgtgcaccaccacgccaggctaattttttgttttgttttgtttgtttgtttgttttttgtagagaaaaagcgatctgtctgccttcgtctcccaaagtgctgggattacaggcgtgagccacctggcctcctttactttcttaaacttactttatggacttgtccagaattctttcttgcatgagatccaagaactctctcttggggtctggatgaagaccccttttcggtaacagtttcctcttccccaaatgaaagagggcctttgctgatcatttgagagaaaacaaatttgagtagaagccacactccctgtggggaggggcacactgtgggacaactctgttggccctcaaggacgatgactaataggttgctgatgtcagaggcatttgaaccagagcaacaacatcttgaataggggctgggtaaaataaggctgagacctactgggctgcattcccagatggttaggtcattctaagtcacaggatgagttaggaggtcagcacaagatacgggtcataaagaccttactggcctggcgcggtggctcatgcctgtaatcccagcactttgggaggctgaggtgggtggatcacctgaggtcgggagtttgaaaccagcctgaccaacatggagaaacctcgtctctactaaaaatgcaaaattagccgggcctggtggtgcgcacctgtaatctcagctattcgggaggctgaggcaggagaatcacttgaactgggaggtggaggttacagtgagccaagattgcgccattgcactccagcctgaataacaagagtgaaacttcgtctaaaacaaacaaaaacaaacaaacaaaaaaaacctagctgataaaatagcctgcagtaaagaagccagccaaaaccaagatggagacaagagtggcctctggttgtcctcactgctgtactcctaccggtgccatgacagtttacaaatgccatggcaacatcaggaagttaccctatatggtctaaaaaggggaggcataaataatccaccccttgattagcgtatcatcaagaaataactggccaggcgcggtggctcatgcctgtaatcccaatactttgggaggctttggtggatagatcatttgaggtcaggagtttgagaccagcctggccaacatgataagacccccgtctctaatactaaaaatacaaaaattagccaggcgtggtggcacgcacctgtaatcccagctacttgggaggctgaggtaggagaatcgcttgaacctggaaggcagaggttgcagtgagctgcaatcgcgccactgcactctagcctgggcgacagagtaagacttcgtctcaaaaggaaataaccattaaaatgggcggccaggcgctgtggctcacacctgtaatcccagcattttgggaggccaaggtgggcggatcacgaggtcaggagatcaagaccatcctggctaacatggtgaaaccccatctctactaaaaatacaaaaaaaattagccaggtgtggtggcaggcgcctgtagtcccagctactcgggaggctgaggcaggagaatggcatgaacctgggaggcggagcttgcagtgagccacgatggcgccactgcactccagcctgggcgacagaacgagactctgtctaagaaaaagggcaaccagcagccctgggggctgctctgtctatggagtagccattctttagtcctttactttcctaataaacttactttcagtttactgtatggactggccctgaattctttcttgcgtgagatccaagaaccctctcttggggtctggattgggacccctttcccgtaacagtgtcagaggtgtttgaaccagaggaaccccgacttgaataggggctgggtaaaataagactaagacctactgcactgcattcccagatggttaaagcattcttagtcacaggatgagataggaggtcagcacaacatacgggtcataaagaccttgctgataaaacaggttgcagtaaagaagccggccaaaatctacccaaatcaaaatgacctctggtggtcctcactgctacactcccaccagcgccaagacagtttagaaatgccatggcaacgtcaggaagttaccctctatggtctaaaaagaggaggcatgaataatccaccccttgtttagcatatcatcaagaaataaatcataaaaatggggaataagcggccctcggggctgctctgtctgtggagtagccattctttgttcctttattttccttataaacttgctttcactttacagactctccctgaattctttcttgcgtgaaatccaaaaaccctctctggggggtctggatcgggacccatttcctgtaacactgggaggctttggtaagaaacggactgtccagacatctggtggccacagagtgttcagtctgccttcgctgctcttcctggctgggagccacaaatcttccatgctttactttctaaataccactcccttccacccaccgctctctacttccactgctcccatcctggtctaagccaccatcgtcctttgcctaaatgatgaaacagcctccctccaccctccctggctccgctccaatcactttcctgcagagcagccagagtgatcactttcaaatgcaaacctgaacttgcagctcctccgctcaaagcccttggatggtttccaccagcgtgaatgctaaagcctgaactcagtgcataaggtgctgtgtgttccgctcctctggctgctccgggattatcttgtactctctttcttcccctccctctctgcagcctgggaaactcgtcttaaaaaaaaaaaaactcttgaaatgtaccatgctgtctcccacctcaaaaatcacagctgttcgtgatttttctcatgatgaatgcctacgcattcttcagatctcagctagaatgccacctcctctgggaagcctccctcatctcctgcaagactgggttaggtttccctaggtaacaggtggtattttccaaaaatagccacaacatatttcctgtcccacatgatactcttggccatttgccctcctcttgaatttaggaaaaactttgtaacagcctgtatggaaagaatgcaatggaaatgattctgcgtgacttccgagtctgggtgagaaaaggtaatatgggagctgggtgcagtgatgcatgcctgtagtcccagctactcaacagattgacgtgggaggatcctttgagtccaggagtttgaggccagcctgggccagcctgagaccctgagtcccaccccaacccctgccatctccggaagaagaagaaggagaaggagaagaggaagaagaagaggaagaggaagaagaaaaagaaaagatgatatgattcccacctggctcacacgctcacttgttcttagaacggtagttgtgaagaagctcaggctgcaaggagaccacatgtaggtattccaagcaacggccccagcgagggtctcggcctgtagcctgtagcaactgacatacatatgtgtgagcaaacattcaggtgattccagcccccagactttgagccacccagctgatgccaaggttgagttattcctcccaagcctgcccaaattgcagattgaagagtaaaatgaatgtctcttttctttctttttttttttttttcaagacagggtcttgctcttgctctgttccccaggctggagtgcagtggcgcaatctcagctcattgcaacctccaccttctgggttcaagcgatactcatgcctcaacctcccaagtagctgggattacaggtgtgtgccaccacacctggctaattattgtatttttagtagagatgggatttcaccatcttgtccaggctggtcttgaactcctggcctcatgtgatccacccacctctgcctcccaaagtgctgggattacagccatgagccacttgccccgtgaatgttgttgtcatttgaagcttctaagtcttgagctgctttttattttcttttacagaaagcccagaccttacaatgtttttattttttctctccatttttctttctttttaatgtttttgtacagatgggatcttgctatgttgcctgggctggtctcaaactcctggcctcaatgcatgcccccaccttggcctcccaaagtgctgggattgtcaagggctcatttgttacacagtcatagcaacagaaatttaggaactgttacatgtataccttctctttaaagtatttgttacatgtgaaactttacatttgtgtgattactagattcctgtctatcctgagagactaaaagctcttaacggccaaatttgcgttcctttttaccattctattcctgacacttagcaaggtgcctggtaaatgatgcactcgatgccaatttactctcaactttcctgcacctcttcacttataaaaagagaaagcacttggtcattaattgaacgttcacttatttgatgaatgctgactgagagactgtgtcagggatttgtattagagacggacacaaaacaaatatgaaatacaagggactgaggggagacatagaaggggactgggaacacttcctgagggaaagggatatttgggctgcgtttagaaggatgtataggtgttttctgaataacaaagaggcatgacagtacttctggcaaaggaaatggtgagtgccaatgcttgggaccaggaagcagccaggttggtcaggcaattgtgtgaagttctgcacagaggcaggcagtttgcttggaaaatcctgcaggaaaaggttcctaaggaccaattctgacagcctgcaatgtaggtgcttagatttcatctcattagaaataggaagaccttggaggtttggaaggagtggtggaaaaagtggagttttttgtttttctgtttttttttttttaagagatgagatgctctttaaaaaaaaaaaaaaaaaaaagcactgctatgcttcccaggctggggtgtgcagtggcaagatcatggctcactgcagccttgaactcttgggcatgagcaatcctgcctcagcctcccgagtagctgggactaaacgtgtgcaccaccacgcccagctaattttttcattttattttattatttaattaattaattaattaattttttgagacagagtttttgctcttgttgcccaggctggagtgcaatggcgtgatcttggctcactgcaacctccgcctcccgggttcaagcaattctcttgcctcagcctcccgagtagctgggattacaggcatgcgccacaaagcccggctaattttgtatttttagtagagacggggtttctccatgttggtcaggctaatctccaactccagacctcaggtgatctgcccgcctcggcgtcccaaagtgctgggattacaggcgtgagccacggcgcccagccaattttttcattttctttttctttttttcaaggcccggctaattttttgtatttttagtagagacggggttgcaccgtgttagccaggatggtctctatctcctgacctcgtgatccgtccgcctcggcctcccaaagtgctgggattacaggcgtgagccaccatccccagcctagagttcttgatagtatcagggctgagaaagtaccagagttagagccaggtggggtggcactaaaagtacaaaaaattagcagggcgcagtggcgggcgcctgtagtcccagctactcaggaggctgaggcaggagaatggtgtgaactcgggaggcggagcttgcagtgagcggaaatcgcgccactgcactccagcctgggcgacagagcgagactctgtctcaaaaaaaaaaaaaaaaaaaaaaaaaaaaaaagaaagtaccagagttaggaggctcctaaactggtccagatgggaagtgacggggccaaggatagggaagtgaagatgggaggagtaggactaacttaaaggccatttagcaaaaattcaccacgcaaggccctatattagggcgctgggggctcatacctcatcgtcccgtcaactctataaagcaggggccaacaaactttttccataaaaggccagatcgtaaatacttcagggtctgcagatctgtaggatctttagcaactacctactctgttgtaaggcgaaagcaggcagagaagccaggtaaacgcgtgggcgtgtctgtgtgctaataaaactttattcagggaccctcaaatgtgaatttcacaaacttttcacaggtcatagactattcttctttggatttttcccccggctatgtaaacatgtaaaaataattctgagcttgcggggccggacaaagtaggcggcgggtcttggctcgcctacccctgctatataaatcattaattatgataccaatcttaaggagaaggtcttcagaagagtccctcaaagagcaccgcccctcaacgtcatcaaaccccgcctccaaaggcggaggctgcgcatgcgcggcaggacctcgggcgggggcggggcggggcgcagctccgacttcggacatggcgcacgctggcggtggcagcggtggcagcggtgccggcggccccgcgggccgggggctgagcggcgcccgctggggtcgctcgggctccgcaggccacgagaagctgccggtgcacgtgagtggcgtccccgccctccctcggggaacccatcttctggaccccgcgggcgggcgcccctcacccaggccccgcccggccccagccccacctcggcctcccctctgcactgccccggacccctcacccctcacctctcacctcggccctccgaaagcccagcccatccccttcccctcagggaccccggcccctcgtcccctcgttccgcggccagggcccaccgggaccctccccctctctgcaggtagaagacgccctcacctatctggaccaggtgaagatccgctttggcagcgaccctgccacctacaacggcttcctggagatcatgaaggagttcaaaagccagaggtaccagcggggcccctctccacctcaggggacccccctgggccggaatcgggcctagcggggtgagacctcccctctccagcctgcccccttagccgggtgaccttgcgcaggttgtccaatctctcagagccctagctccttctcgtaacaaaaatggaaatgggtagtacccaccttgtggagctttgtggggattcctggaagcaggacagggatctggggggaggcagggagggcgaggccgtgcacactcatagagtcaaatcctgccttgatttaatatgttgatttttatattagttttgttcatgaaagatttggtgggacccattttgatttttattttcaagcgctgtaaaatgttattgtcttgatgattgaaatttttggcaccctcttcccctttaatcttgtcctcaagatgcttctctgggctcactgtggtcccaggcctgcttggaagtaagacgcataaaatgcttagtaagggagctggcacacagaaaacgtttaaaacacatgagatgattttgcaggcccagaatcaaggaagattacagatagatgggaaaccctgggatcatgcccttgtttttataggagactcactgaggtttggagtgggtaagggacccacctaagtggcagaggtgtcactagaactcagaccctctgactcagattcttggaagtcacatgcttaccatactgctgccccctcttaggaaacatggtggggctggcctggtttccttccgggagcccagtgctaagggctgggctgcaatgcagccagaagggagaccccatctctcccctcctatttttcttacacctttcccattcttggcagtaccattggtatttatgcattgcaattgtttgctcagatggaaacctgtgtcatagtcatctctatctgatacaaaatgagggaagttttcacattgcttagaggactttggcctcctgccatttcttggagtccaggccttgcggttggctctcctgacattttcagaaccgagtacccattcttggagtgttttaggggagctgagcgatgtcagtattctctggttctcaccaggagggaacagggagctcaggcctagccagtcaggagataggtcatggtgtacagatgctatcacatgggggcacttttttttttttttttgagatggattctcgtgctgtcgcccaggctggagtgcagtggtgtgatctgggctcactgcagcctccgcctcccgggtgcaagtgattcttgtgcctctgcctcctgagtagctgggactgcaggcacgcaccaccactccaagttcgtttttgtatttttagtacagacagggtttcaccatgttgaccagtctggtctcgaactcttgacctcaggtgatctgcctgcctcggcctcctaaagtgctgggattacaggcatgagccactgcgcctggtgggtcacattttaggttcctttgttgtctgttgagaaggtttttatgtggcagtatcaagggagtggggaatagattatatttttcatttatttcccaagacccttttgcccacttccgttgtttcttctagcatcgatactcctggagtcatcagacgtgtctcgcagctcttccacgagcaccctgacctcattgttggattcaacgcttttcttcccctcggatatagaatagacattcccaagaatggcaagttaaacatacagtcgcctctgacaagccaggtatgccactacagtggttcgggtgatctcagccttcaccgagtatgtcttgctactcaggttgggccacgtgtctctcctgtatcattgctagaaagccacttaagatctgttctttttctagacgtgctcattgcttctagcacaaatcaaaatagatatggaaacacctacacaagcagcctctgcctcccaaattgatctgtttggaagatttaaatcaagagtggatgtcagggaggtatcctcctaacgcagaattttgtgtgaagtctaaataaccacctcagcagttgctgaggtcttggcttgaggctttcccagcgagcataccaggcaggcttgcccttgtatttaagcatgtcctcgtctgcctctgatcactctcagtaccacctacaaaataaagtggtcgagatggtgtgtgagtagccacgtttatgttggctgtgtttcatttaattgttgataggatcattagctcagctgggactcctggctttgctttggtcccttttttcttgggtgataggtgctggccctctttttttttttttttttttttttggagacggagtctggctctgtcacccaggctggagtgcagtggcgcaatctcagctcagtgcaacctccgcctcccaggttcaagcaattctcctgcctcagcctcccgagtagctgggattacaggtgtgcaccaccatgcttagctaatttttgtatttttagtagagatggggtttcttcatgttggccaggctgttcttgagctcctgacctcaagtgatctgcctgcttcagcttcccaaagtgctaggattacaggcgtgagccaccgtgcccagcctccttttttttttttttttttaagacaggttctcactctgttgcccaggctggagtgcagtggtgccatcatatctcactgcagcctcaacctcctgggctcaagtgatcctcccgtctcagcctcctaagtagctaggactacaggcgtgcaccaccacggccagctaatttatttattttttttgtagcgacagggtctcactatgttgcccagggttggtctcgatctcctggcctcaagcgatgtgcccaccttggcctcccacagtgctgggattacaggagtgagccactgtgcctggctcactgccccttctatctctgcagtctcttcatgcttgagcttactagcgcctctgagaaaaagaaagcctacttaagatttccttttataagatgaccattgtcattttttccacctcaacactatttcccatttaaggcataattctttgctgttgggggcttcccagtgcattgtggggtgtttagcaggatctgtagcgtgtacctaccagaccttcactcagttctgacagccagaaatgtctccagacattgccaggtgtctccctggggggcaaaagtgcccctgttgagaaccaccggtgtaagtggaccagctctcccaacctcctccagtccttgcctcgagagttttagcagggagtgtcagaatctactgctggaagcacttggtaggtcttctttgatggaagagatgatagagcgtccaatcaattagggatctgacactccgcagtcagttggaaagagaacagcgaagggtaatgtggcagtgcttttgtattaattccatgtgcaaggtgtgtgtcaattctgctgcttctcggccaggcgcagtggctcacgcctgtaatcccagcactttggggggccgagatgggtagattacaaggtcaggagttcaagaccagcctggccatcatggtgaaaccctgtctctactaaaagtacaaaaatcagccaggcgcagtggagcatgcctgtaatcccagctacttgggaggctgaggcatgagaattgcttgaacctgggaggcggaggttgcagtgagcagagattgtgccactgcactgtagcctgggtgacagagcaagactccgtctcaaaaaaaaaaaaaattctgctgcttctctgtgcaagaccctctctgccatcagcctgttgtctcctgaaagccaaggagcgagtctcagggttttttttttgccttttttgagaaggagtctcgctctgtcacccaggctggagttcagtggcgcaatctcggctccctgcaacctccacctcctgggttcaagagattctcctgcctcagcgtgctgagtagctgggattacaggcacgcttcatcatgcccggctaatttttttgtatttttagtggagatgggggtttcgccatgttggtcaggctggtctcgaactcctgaccccgtgattcgcccacctctgcctcccaaagtgctgggattacaggtgtgagccaccgcacccagctgaatctcagctttaaaggggaacttggaagcgtgtggccactgaactctgaagagccttccatttcctgtttgcaaatgaagccccaggatccagatgtactgcttgtgtcttagaccatgaaagccttagcaagactgatctccagaacagtcacgactgcgggagaaagccaagctcatttgcaatagcagcgtccaccagagcactttgcagagcctgaatgctgtggaaactctgggtctcgttcctgtcactcactcagaaagagccagagtgaaaagatgtgaactgtgcgtcctgcatgtggaaattgcctttcagcagagtccctgcccgtggagtaactcggctttcagggctagatcttgacaggcgccacactggttgtatttggagttggctcttcctttaagtagctgcgggtccccaaccgtggagggctggcagtcttgtctccccgtaggtggcttaggtgacaatgatgacggtgcagacccatcgacttggggaaaggcttgaaaagaactttcacttagtagctactcagcagggccttggtcatcgtgctgcagcctgggaacagtcatttccaggcttaggtgtagaagtttgttctcttcgggggcccctgggagcccactggcttccagttgatattgacacaggtgctgtcaggtttccagccctgtttcccagcagtctgggctgttgtttgtgtggcttcaggacagaaacatgagagatatcccaggtccaggccatgactcgcgtggcttcaggagtcctttgagctttcggctccctggagtcctttgagaggccatcgtctgaaagcctcacagggtttcccacacacagaggccctggtgatattctttctttctttcttttctttctttttttttttttttgtgacagagtttcagagtttcgctctttacccacgctggagtgcaatgacacaatctcgactcaccgcatcctctgcctccccagttcaagcgattctcctccctcagcctcctgagtaactgggattacaggcatgcaccagcgcgcccgactaattttgtatttttagtagagacggggtttctccatattggtcaggctggtcttgaactcccgacctcacgtgatctgcctgcctcggcctcccaaagtactgggattacaggcatgagccactgcacctggccatcttttttttttttttttttgagacagagtctcgctgtgttgcccaggctggagtgcaatggcacgatcttggctcgctgcatcctctgcctcccgggttcaagtgattctcctgcctcagcctcctgagtagctgggattacaggtgcctgccaccactatcagctaatttttgtatttttagtagagatgggatttcaccatgttggtcaggctggtttcgaaatcccctgacctcatgatctgcccacctcggcctcccaaagttctttttttttttttttttactttaattgaattattttttaattttgagacaccatttcactgtcacccaggctagagtacaatggcgtgatctcagctcactgcagcctccgcctctgaggttcaagtcattctcctgcctcagcctcccaagtagctgctattacaggcatgtgccaccacacccagctaatttttgtatttttagtagagacaggttttcaccatgttggccaggctggtctcgaacccctgacctcaagtgatcccccacctcagcctcccaaagtgttgagattacaggcgttagccactgtgcctggccttttttacatttttaaaacagagacagggtttcaccatgttgtccaggctggactcaagtgatcctcctgccttggcctcccaaagttttgggattacaggtgtgacccaccacgcctggccagtattctctgttgcttagtttttctagtttgactgttttgaagtatctttttccccccccaattttatcacaaagcctgccagctactgacaagtagggagtggcccataggtggtaaggaaggtgaataagagagtcccagcctcgggcagcctttggcgcagggtgtcttcagctttgggggccagactgttctttatggcgaggtgccgtcctgcacactgaagggtatttgagcagcctccctggcctccacccaccagatgcttctagatgtgataacctaaagtgtctcccgtgttgccgagtgtcccctgggtggcagagttgctcaggttgagaacacgagtctaaaggggaagacagacacaggccgtggtgtgtggccagtgacgacctggggaatttggaggaaggaacagcttcttactggagccttgccttggcctcctgagtcagcatcatttactgtctggtaattcaggccttggttgtaatgtcagctccacagagagccccctagtccctaccctgtgtcattcttacaccaccctgggttatgtatttcaaaacggctaggaaaagaagttcagaatgcattgtttcttattggttttccttccttggttgacggtgagtccttaagatgaggtgggccctgcactgtcttgttcatgactgtatccaccttctggaacgtcgccagggagcagtgcatggtgcaggaatgagaaactggatgctggtgggaacatggccgctctcagctagcgggtcctcttcagggcagaccctgcctcgtggaagatgacagctggcttggacagagacagagataaccccttaacgtgcagctcctaacttaagcagcccctcgacattcaaagggagccccctggctgttctctgggggaagtcccgctagttgtcaacaagtcgattcttgtgtttgtatcttcttggctcatggagcaggcggtgaccccttctccgagccaggccctggggtttattcagaggccctgctttcagggttcctgcacagtcaaggtggggggtccgatgagaaacagatgggcagatgcgggtggcgcatgggagagggcagagagaggatggagcaggccagggaagggtgggaggaggttgctgtgggcaggacctgtttcatgagggactgttcctggtggggagtgatggcctgaggtgagagtgagtgggtgtgcttgaggaacagccaaggagaacggcagggtcaggagctgaaggagagaagggggagagggagccaggagcgtgagaaccactggatggttctgggaggcggttctgctgctgtgctgagaatgaggggtcaggaggcccctgggagaccagggaggggccccaagtgatggaggcggggtagacagtgatggaaacagagtggatggtgacaaggaccagagagggtcccaagtgatgggaacagagaggatggtgacaaggaccagagacaattcccaagtgatgaggacagaatggatggtaacaaggagtagggaaggcctcccgagtgatggggacagaggtggacagcaatggcgacagagtggatggtgacaaggaccagagacagtccccaagtgatggggactgagtagacagtgatgaggacagagtggatggtaacaaggactggagagggatcccccgagtgatggggacggagtggacagtgataaggaccagagaagtgccctgagtgatggggacagagtgactggtgacaaggaccagagggggttcccatgtgatgggggcagagtggatgatgatgtagatcaggagcgggggtgtcagtgagagtgagaagtctgggctgatctcaggatgcctgattctctgggtaaaagtgtgggcccctgctgaggtgcataaggccagggcagttggggggctgctatgtgtctgtgcggtgcctgccatttgaggctctgttaatcagtacccaggcggggctgtgtgtggatgctcagatggacgtgtcggccacgcaggatggttgtcatggtgtgggaggcagttcgaactctgcctgatgaggccacccagggcacggggagagaggaggtgccggaagaaaaagaaaactgggcttgtgctgggtggtttagagcagcacagtcggcaaatggtagcttggagaccaaagccagcctggctcggtgtgattggttgtgatttttacattttcaaaggattaaatttttaaaaatgtttcatattgtgatactgttcacataacataaaatcatcatcattttaaagtgttagtatattcacaatactgtacaaccatcaccactaattccagaacattaacatcaccccaggatcaaaccctgaacctcctaattctcctctccccaagcccctggcaaccatgagtctgcttcctgtctttatggatttgcccgtatggacatttcatatcagtggggtcatacaccgtgtggctgttggtgtctggcttctcactcagcatcgtgttttccggggtcattcacatcggagccggtatcagtgcttccttccttaagactgaatcattctccactgtatggcaggaccacatttcgcatgcccactcttctgttgatggatgtttggcctgtttccaccttttggctgttgtgcatagtgctgcaacgaacattcatgtgtgaggatgtgttggaacacgtgttttctttttctttttttttcgagacagagtctcgctctgtcgcccaggctggagtgcagtggcggggtctcagctcactaaaacttctgcttctcaggttcaagcaattctcctgcttcagccttccaagtagccgggattacaagttcccaccaccacgcctggctaatttttttgcatttttagtagagatagggtttcaccatgttggccaggctagtcttgaactcctgacctcgtgatccgccatccttggcctcccaaagtgctgggattacaggttccagccaccgcgcctggcttttttttttttttttttttgagatggggttttgcttttgtttcccaggctggagtgcggtggtgcattgtcggctcaccacaaccccctgggttcaagcaattcttcctcctcagcctcccaagtagctgggtctataggtgcacaccaccacacctggctaatttttgtatttttagtggagacggggttttgcaatgttggccaggctcgtctcaaactcctgacttcaagggatctgtccacctcaacctcccaaagtgctagaattacaggtgtgagccactgcgcctggcctgagccactgtccctggcctgagcaccttttttcagttctcttggttatagacctgggagtgggattaccaggtcatatggtagcaataattccatggtcaacctgttgaggtaactgccacactgtccctcgtggtggctgtaccgtcccatctggctctttttgccaagccctggtctagagcgtggttccccattttgtcgcagtggcacactttaggggatcagagggtgcatgcggagcttggaaatgcctccttggaatggtggggggctcgcagtgagcctacagctgcctctgaaacagaccttggctccatgctgcttccctacatacccacaccctgctcgttccgaccccttctgccatcaaacctgtgcaccatggagaaacagacgcagccccctgtgagcctgagcagagaatcattccggacatccccagagaatcttacaacaaaccccgccactgactgggcgcagtggtttacgcctgtaatctcagcactttgggaggccaaggtgggcagatcacttgaggtcaagcgagaccagcctggccaatatggtgaaaccccatctctactaaaaatagaaaaattagccagcgtggtcgcacggcacctgtgatcccagctactcaggagaatcacttgaacccgggaggcaaaggttgcagtgagccgggatcataccactgcactccagcctgggagacagagcaagactccatctcaaaacaaaaagaacaaatcccgccaccaaggagaaattgttttagaatcgtggctgctctgcgtcttgtatttctgcttttctcagctgagactttctagaattgtctctgtacccattgttctgggcagaattgtgtcatccccccaccccacattccaccccaaattcatgtattttagccctagccccagcgcctcagaacgtgactgtatttggagatggagcctttgaagaggtgatttaactgaggccgttagggtaggccctaatccagtctgattggtgtccttataagagaggagattgggacacacatcagggacatgcgtgcacagagagaagaccacatgaggacacagacagtggccacccacaagccaaggagagagtccttagagaaaaccaaacctcctggcaccttgaccttggcctcctggcctccaggcctccagaactgagaactactaacttctgttgtttcagccagtctggggtacctcgttgtggcagcctgagctgatggatgcactcaccccactgacggtgcctgtgcccagcagaggtacctgtttcagtacaagacggtagtggtgtgcctggccttgcctgttgcagtagattttcagggtcagcgtttgggtcacctgcagtgttgggcactgcagggcagcggaaacagtgaagtctgtgtgtcccttcatccgttcacctgatcatccccaacagtgggtgaagctcactctgtttctcacactgttctgggcactggggatacagccctgatcaaaacccccaccctcgtggagttcgccatctagtcagggactggcagacagtgcaatgagtaaaatacatgatccataaggtggtgacgggccgcggagaaaaatgcaggagtgctaggaggtggcgtcattttactttggtgaaagagcgttctctaggactcaccaagcagggcttatccaagcaaaaacctcagccaggctggaggaatcctgactggctggagacccagcccttgtgtgctggggatggtgcagcataattctggtttagaaacaacagctcctcctctgggggagtggtcctgtcccaccacaacatgggagggaggcaagcttctttctatttttgctcatatcggctgaaaagtacacgcatagagggcattcttggtgggtgttcagggcctgtcttttctcccaagcgaccgatgcaccttattgcgattggcctgggtcttagcaccaaaaatgtcatgtcccttgaagtccccaacaacctggacagtgggtcgcctctaacctccagggtccccatcttatatatcctaccttggcatcactgctggcagcagttgcctttccacgtgaaagcaatcttgctgaaacagattgcaggaggcgtgggagacttctctattatatgcagcccagcacttggcaccacagaggcttaaacatccactttgtacatttctcctgaatgtgaagttttccaaatgcaaggtgctcgttgaacttgttgtgttccttgagtagattggtaaggatcgggtggaggtgagctgggaagactcacctgtgcaccccgccctgcttgcctccaggctctcagaagtaacctttccctgtctctaatacagcttggctccgtgctgagttttttctgttcctgtgcagacagtggctgggcctggtgtttttcacaatctgtttccagtgtcgggcctggcagtaactcattgtcgccttgtcaggagaattcgcacaaccacggggacggtgcagaggacttcaagcagcaggtgccgtataaagaggacaaaccccaggtgcccctggagtccgattccgtggaattcaacaacgccatcagctatgtgaataagattaaaacccgcttcctagaccacccagaaatctacaggtcattcctggagatcctgcacacgtaccaggtaagaactcagattacaattccttgtgggttttggatttcatccagtttggggccctgcagatattcagattttcttgtcggaattcataaaatcctgtaaaattctaattagttgtggggttttttgtttgttttttcttagagtctggctctgttacccaggctggagtgcagtggcacggactcggctcattgcaacctccacctcctgggctcaagccatcctccaacttcagcctcccaagtagcggaggctacttggggctagaacatgggcgcacatcaccacacctagctaatttttgtaatttttgtagagacagggttttgccatgttgctcaggctggtcttgaactcctgaactcaaacgacccatccacctcagcctcccaaagtgctgggattacaggtgtgagccaccgtgcccagccacctttttttttttttttttttgagacagggtcttgctctgtcacctaggctggagtgcagtggtgtaataatagctcactgcagccttgacctcctgggctcaagcgatcctcctgcctcagccctccaagtagctgggagtacaggtgtgtgtcaccacacctggccaagacagtctttttatcagatgactttgttattgcttaggcaatacggccatcctttactttgctgattacaactgggcccagcaccaggagctggggctacagagacaaatggctgctcctgcttagctgttcattgcagtggtgggaagaaactcagaggtggattggggtggaaaagaaaggatgtgggcaggagaggtgagtcagggttaatatgattcccagcccggttcccaacccgtccggggccagggaggggacagtcaggttgaatcttgacatatcagtcggaaccagtaggcaggttagcctggaggaagggtggacattcttggtgccaggaatggcctgtgcaaaggtccagagaccagagcagacagcggcatcagggcgtctgcaggggacttgggcaatgcaggtgggctggtggcgagggacatctgtgtcgtgagtggggcttagacgtcctcttcacccagacgtggagtctctaacgcttggaattttttttagcagcagaacccattttttttcttttttttgaaacagaatcttgcgctgtcacccaggctggagtgcagtggctcaatctcagctcactgcaacctcagcctcccggcttcaaacaattctcctgcctcagcctcctgagcagctgggactacaggcatgggccaccacgcccagctaattagcagaacccattttttaaaatgaaatccctgcagccttgacatgtcgagtcaagaagcgggattcttttcagcataagcgtttcagatcaaatggatagaatttgtgttctgggaactccacagcatttgttgtccaccgtgctggcatcatcatgggccttagcatctgtgagaggctggtacagccctaagaacgcttgtttgtcatggatgagtggttgccagtggctgctgtgagcatctggtctgtgtggagggatgtgcttgtgatcgtagaatctgtgggcccctcccaggctttgtggggtcatcacatttaggaaggcgcatcagagcagtctgtgcagtggctctgttctgtggcaaaggaaggggcaggttaaagacactagagatgaatttagacaaggtcacaatgaggggttgccacagactccttcagagagagtgccatgggaagggacaacgcagtatcccccaacccaaaccgggctgctgagagttggttgagaatgcagacacctggccaccatgcaggattcccattcatcagggcccgcccggcatcggcacagtttctttttttgtttttatttttttgagactgggtctcactgttgcccaggctggagtgcagcggcatcatcacagctcactgcagcctctacttctctgggctcaagcaatcctcccacctcagcctcctgagtgactgggactacaggcgctcactccgacgcccagctaagggctaagaggagacggggtttcaccatgttgcccaggtgggtcttggaactcctggcctcaagtgatccacccacctcagccccccaaagtactgggattacaggcgtgggccaccatacccagctggatggcatctgcattttaaacaaggcccctggtgactccagcctcaggttgtctagttttttcaaatgtaagtttgaactgttgtgtaaattatcctggttttagaatgttggttcagatatttcagggatactgttagagccaaaccaggcagctccagggtccatctggccgtgtgttactgtttctccatctttgtggggctttccttcagactttctctctgccaccttctccctcggggttcttatccgtaaaatggccacaaaactggtggtgccaatgagcctgggttcagtgaggttaactgagcaaccagttcaggcacaagcctgcctcaggtcacccctgggtaactgtcacccattacacagccacgtatgcatgtcctgtgtgtgctgggatgaacagttagtcctgccctaacataagtgggaccctaaaaacgagctccctctgcagagttgcaaagtgtgatgggaactgcaggttcatgggaaacagactcagggtatgacattcaaaaacttcctcagggacacctagaaaaagataggcaccgactctaaacagcagcgccgttacgcgcatattaagtggccgagaattacatgaatgccacagcaaatcgggtactgaccttggaagagacctgaggctggtttgtggatctggtggcagcctgtgaattatgtgaaggccgggaggaggtcatctgaaatcagacaggtcattgtggcctcagatggggacagggctggcccctagcacaggggaacgctgagagagtgcatggacatgggagggggtgctggcgtggttttgcatactcccacggggttctggtcagccgggagcagtttctgcattcacctggtgtttctcctgcacaaaatagaagagaagcaaacagaaaattcacctcatgctcaaattattcccagtacttgtatctcatttagacagacatcttgttcaaaataagcattctagcagaactgactgtctctgcagcatgaatttccagaaactacttccctaagttgagggcgtactatgcattcatagagatcactcaatttccttctaaaaggtggtaccaatttgtctttctgccttccgtgtttgattgtttgtttgtttgttttttgagacggagtctctttcacccaggctggagtgcagtggcgcaatctcgtctcactgcagcctccgcctcctgggctcaagcaattctcctgcttcaacctcccgagtagctgggactacaggcacgcgcccccacacccgggtaatttttgtatttttagtagagatagggtttcaccatcttggctaggctggtcttgaactcctgacctcaggtgatccgcctaccttggcctcccaaagtgctgggattacaggcctgagctaccgcacctggccttgccttctgtgtttgagagcacctgctccccacaccctcatcggaaatcctagcctcttctgtctgtgtagtcagatgagcagagatggctgtggcactgttttaaattgtttctttaaacatcagtcaatttggtcattgtttcttttcttctttatttattttagataggatcttgctctgttgcctaggctggagtatgcactatcatgatggtagctcactgcagccttgagctcctgggctcaagcaatcctcttgcctcagccttccaagtaactaggaccacaggagtgtgtcaccatgcctacataatgtttaaaacaaatttttttaatcatttctcagcattttggctaagatcaagtgtaaaattttttgtagcgatagggtctcactgtattgcccaggctggtcttgaactcttggactgaagccagtctcctgcctcggcctcccaaagtgctgggattacaggcatgagccatcatgcccagcctaaattgtttctttaaacttcactcagtgtggtcgttgttctgtccgtatgcagatagatcatttctatttattatctgaactgagtggcctttgcttgtttttaagttttgctttttagtgtcttttgatgactttttggaagggtggtgttttttttcccctgcagtgtaggtgctgccggtgccaagatttaaaacttgcttcccttcccacaggctgcagcgggtgcagaggggcaggaggcgccagcacagggattcctcctgctttgcagccgtgcagtgggactctggaagccacgccatattatccgggaggctccggtgctattgcctcttgttctgtgacactcttgggtgtaaaattgatacggacgtatttctaacagccacggcggttttgctggcccgttcctgccttccaacctgggttccctttggtcctcttgttgctttaaggtctggatcaggccattttccttgggtctcagtgactccgggccagtaggtgcctcggcctggaagtcccttcccttcatggcccagcgctccccagttctacactccccatttcccttgggaaggcctggggttcgcccctgaccttgtacttccccggcccacccctgattacagccagcctgtcacctccctgccccctctgttcgtggacactgctgggtccccaccatactcctggacgggacctgcccatggccggggctcaggccatgctgggcagcaagatccacaagtgtgcagacaggaccctgcgggcaggtgctctttcctgagagtcatcctgtccccttcacggagggctgcctgagtgtcccggcccagggcacagcactccttgactaacgacttattttccctttcctgaaaactggcagaaggagcagctgaacacgaggggccggccattccgaggcatgtctgaagaggaggtgttcaccgaggtggccaacctcttccggggccaggaggacctgctctcagagtttggacagttcctgcccgaagccaagcggtctctggtgagtgccgagagcccctgcccagcctcgggggcctcagcgaggacggagggccccagccagcttgacccatgtccgggccaagcctatgtaccctccaggccacactagggtcccccagaagctacgcaggttgcagatacccaggggttcctcactgtaggctccacctgcacagcaagctcgtaaacgatttgccaaggtgcttctctgtacagacagtacctggatcttggggtggtttgggaggcagagagcatcttccagtggagactatgggcccaggggttccacctcctgtgtctgccctgcagagccccaccctgcctgggaccccagccctgtgggaaggtgcaggagggctgggtccacaatcatcgcttcccctgttggatgagactgatctggggctccagcaggttggatctggaggagccagtagcgggggtggcctgtggcctggccctgaccatggtggtagagagcagagatgggcgaggaggggccttagacagggctcagggctcaccctgcacagtcagcctttctcccctgcctgtggcctgaagctgccagggccgcctgttccgattcctcttttttcccccactatgatcataagacttttttaaaaattgaagtgaaatttatgtaacatcgaattcaccattgaaagtgaacaattccatggcatgtggtacatcctcagtgttgtacaaccttcaccactacctagttccagaacattttcatccccctgaaaggagacccagtccccatcagcagccaccccattcacctcccccagctcctggcaacgcccatgtgcttcctgtttctgtggatttgattcgcccattctggacatttcagatgggtggaatgtcaccatatgtggcctttgtgtctggctcctctcactcagcatcatgttttcaaggtttatccatgtcgtaccgtggatcagtgctcattccttttcctggctgaatcatattctgttagatggatgagccacattctgtttatccgtattctgttgatggacatttgggttgtttctgccttttggctgttgtgaacagtgccgccatcaacatttattgcacggatttgtttgaacacctgttttcagttcttttgggtagacacctaggagtggaattcctgggtcacatgttaattctgtttttgactttttgaagagcctctaaactgttttctacagtgaccgcaccattttacattcctatcagcaatggactgcggtttctgtctctccacatgttggccaacatttgttcttttccaggtttttttttttttttttttgccttttgtttttagtagccatcagtgtgtgaagttttattgcattaaggtttgtttgtttttattttttgagacaggctctctgtctgtcacctaggctggagtgcagtggcgtaattgatcactgttcactgcaacctccatctcccaggctcaggtgatcctcccacctcagcctcctgagtagctgggactacagacaccaccacgatgccaggccaatttttgtattttttgtagagacagggcttcgccatgttgcccaggctggtctcgagctcctggcctcaagcgatccacctgcctcagtctcccaaagtgctgggattacaggtgtgagccactgcgcccggcctacttttattttttaattgtagagacagggtctcacaatgttgtccaggttggtctcagactcctggcctcaagcgatcctcccaccttggcctcccaaagtgttaggattacaagcatatgccattgtgcccagtccatggtttctttaagtggcatttatgcagggcacccggctagctcagtcagtagagcatgagactctcaaataacatttattaccaatttagctaagatttttagtgtgtattggtttattagagctatcttgtatatttagaaagattggatcaactttttaaaattattaaaagcactgcatctgttgtgtgaagtataatctttatgttaacttttggacatatattaaaactgtaggaaaaagaaaccaagatgaaatttggcattgctctaattaaatttgactggcctggatcagaggttggcaaaccttctctacaaagggccagatagtaagtatcacaggctttgcaggccagttgatctttgtgtaaagattcacctctgccctagtagcttgaaagcagtcatggaatatgtatgtcaatgactggacagggctgtgtgccaataacactttatttacaaaatgaatgggtgtggccgggtaccaacaaaactttatttacaaaatgaatgggcatgactgggtaccaataactttacaaaaggaatgggtgtggctaggtgctgataaaaaattttatttatgagaacaacaggccctgtgttaatttgccattccctagcctaggtggtctttgggggtccatctagctcagatgttcacataattgggagattaactgaaaagcaagaaccatgtgaactgttggggaagatctgctatacctgcttggtgagcttggctggacgcatggcgggtttcccctccaggtcccctgttcttgttcagcatttgtcatatggtcgcccagctgcatcttttgggaatcagtttacacctgttccagcatatacaaaaaatagccaagcgtggtggctcgtgcctgtaatcccagctacatagaaggctgaagcaagagaatcacttgaacccaggagacggaggttgcactgagctgagatcgcaccattgcgctccagcctgggtgacagagtgagacctccgtctcaaaaaaaaaaaaaaaaagatgtaccagtggagaattgtgtagatgccaatttctccacttacagctctcgaaatagccttgaattttgggtaattattccccccaaataattccccccaaaactcaaatagccttgagttttggtaattattccccccaaattattcttctaagtcttaactgtggctaaataataagtcttttttagtagtagtagtagtattgtggctaaataatgtctttattattattatggtaaaaatagtatacactaatgaaaaaataagtattagcaagagtatcaaatttttaatgcaaacttcctctcccttgactcagttcttagtcattcttctcagaggttagcacttctaagtgtcttgtatatctttccagaaatttcctctgcatgtgtaacaaatactttttacaaagcgacacacggcatcctatttgttctgccccttgggtttttggggtttttccttgtttttttttgtttgtttgttttatttcaggtatgcctgtccctaacagcagcccagagccagcccatagtatctgatcgctgcgggctgatttgttcagatgcaccatgacttgtccatctcacccacactttaggtctttgggggtgtctttgcatccaggtcctgtggtggcaggggaaggcggagtacgatggaggtgaccgcagtggcacagaacgttgtagggcctctccagctctgcccacgtcctgcagaaaagctgcggtctgtccatcgtcccctgcctgtccagccttccagtatgttcatagtagactgttgcagaacagttctttgtaaatgtcattggcaccctgtaggcaccctgctcgggacaagcatcctcgacctgttagccgatggctggagcctgggaggcaggccccgaaccagccacgagccccactctgctcccagcaagtgacgacatcatcccccagaaacgttttgtcattcatagaaaagacttcaaaacctggccccaaggcccccaccagtgccctggcaaacatcagccacttccccttgctgcctgtttctctgtccactgcaccttgtgtttctgtggtgccggcatgcacacggcgagatgccccaccagtggccgccacatgagcccccgcacgggaagacccaactcagctgtctccctcctgaaacccccagcccttctccctcccttatccataaaggcctcacaggagctttctcccagcctggcagtgttagtctgtgatgattcggttaccttggaatgtgagcatcttgctggagtcacctcacgcatggacggagcatctggcctggtgcccgtggccaccattgcccaccgggctgtgggctgagctggaagcagctctgcatgctcaggtgcatgggtccagccacgtctccggtgctgaccacctcccacatgtgtccttagttcacaggaaacgggccgtgcgagatgcacagcgtgcagaagaacgagcacgacaagaccccggagcacagcaggaagcgctcccggccctcgctcctccgccccgtgtctgcacccgccaaggtacctgtgagccacatgcagccatgcctgcacgcggggcccccagcaaatcgggccttcccagcatgtgaccagggaacagaggccccagcaggggttcggggctggaccgggggctgtgtgaggttcaccggcagtgggaccgttggaagtcagctctcctctaaggtggctgttcttccgttctccctgtcctgtgagattgttttgaaaaggaggaggaggaaggagtgttaaccctgccctaggtcccaagaaacagggtgtaccacccagtctccttttcaccctcaggactctctcacaggcaaggccgccatgtacgtttgttcaggttggtcactgcacagctgagggcagagaggggctgggatccagctcctgtcacgcctttcacctgcaatggtggttttccgattccattattccttgtgcagttactacttggctttctactattggtgggaactttgtcgtcctcccatttatttagttatgtatattagatatggactctgggttataatccattctagtgttgatgtccatactgttccagattgggccagcggggtccctttggctcttgtgtcctttttttctttcctttgagacagagtctcgctctgtcacccaggctggagtgcagtggcgcgatctcggctcactgcaagctccgcctcccgggttcacgccattgtcctgcctcagccttcctgtgtccttttggcatgtcctcatcattctttctcctgtggggggatggggtttcactctgccacctaggctggagtgcagtggcacagtcagccttgacctctgggctctagctgtcctctcacctcagccttccaagtagctgggaccacaggtgtgcaccaccacacctttttgtagagatgaggtttcatcgtgttgcccaggctggtctcgaactcctgggctcaaacaatcctcccgcctcagcctcccaaagtgttgggattacaggcgtgagtccctgcacccagctcatcctcattcttcaggcactttggagatagttctggatggacagtgttgtccttcttgccatgatcgtgcatccaagttcaggtccaagtccagcttagagacaaaagcctgcagagactcaacatttggcttctccagggtcttcccagtgccaccctcttcctgtccgcttcttgttgctgtcttggctctcaggacaaaacagggaaaggattctgagattgtcgtagccaggggcacatcccccttgcctttctgatgctgtggcactcttgcctgttacccaaagccctaccctgctgagatggagatcccagatttggcagtggcaggtatccccagaggtgtcatctcaggggtcctgggtaactgagcggctcctgcctgtccctcactgagcatctcatggcagttcccaaaggagagcacggtcttagccttcttgagactctgtgacagcgatggacagaggccaccggtgggaggcacagtgttaactgcatagaatttctccccacagaaaaaaatgaaacttcgtggtaccaaagacctgtccatcgctgcagtggggaagtacgggactctgcaggaattttctttctttgacaaggtgagggtgggccctggcttccatcttggggatgccatgtccagctggctgggccaatgctccctgggcctgccccaggattggggcggggagcaggtagggtgggtgcagtctgaggatggatccggcggggctggcccccagctttcactgcggaagggaatgtgggcctccttggagcccaggcatatactgtgggcaggagtcccagtgggtgctgagactccaagcagagtatgaagacatacatgtctgccaccctgcagctgtgtggctttttcttatatcagggatgattgtagggttcccgcccagggtctgtgggcagagcagacaaggtggccgtgtgcatgggctgtgaattgctgcatggattgcatgcacagactgtgaattgctgcatggatcacgtgcacgggctgtgtgaattgctgcatggacacatgcatggactgtgtgaattgctgcacagatggcatgcatgggctgtgaattgctgcatggattgcgtgcatgggctgtgtgaattgctgcacggatcgcgtgcacgggctgcgtgaattgcacggatcacatgcacgaactgaattgctgcatggacgcgtgcaggggctgtgtgaattgcacggatcgcatgcacaaactgtgaattgctgcatggacgcgtgcagggactgtgtgaattgctgcacagatggcgtgcatgggctgtgaattgctgcatggatcacgtgcctgtgctgtgtgaattgctacacagattatgtgcacgggctgtgaattgctgcatggatcacctgcacaggccgtgaattggtgcatggattgcgtgcatgggctgtgtgaattgcagcacagatatcatttacttatagacacagttggttcccatatcgcacacccatgtggctgacctacaagtgagccaggcccagaggctgaggagcaggggttcacagtggtccctgactgctctctctgcaggtccgccgggtgctgaagagccaggaggtgtatgaaaacttcctccgctgcatcgcactcttcaaccaggagctggtgtctggctctgagctcctgcagctcgtcagcccatttctggggtgagcagctgacttcccagggctccctaggggggttctgttcctgtcaactccatctacttggtttttagttactgtttttgagcaatgattgtgcttttctaaaatcctgtttattaattgacgtgattgatataattattgattcccatgcatttgtaaggagcaatacaccacctgggtaccctccagctggttcctttaccagtaacatctgtagtcagtatcctcaccagaatacagtgggtcctcgagtaatgccttttcatttaacactgttttaacaccgatgagaaaagaagacattcatttctggtctgagtggagtttgcacgttctccccatgtctgcgtggattttctcccacatcccaaagatgtgcatgttaggttaagtctaggttaagcggtgagtctccgtggtcccagcctgagtgagtgtggcggggtgagcgccctgcagtggggtggcgtcctgtccagggtgggtgccccactggtgctctgagctgctgggatagggtccggccacccaagatcctgaactggaataattgggtaaattgttattttacttgtttttactcatctttcttatctgtatgtgtggcttgcatttatttcagtgtttaatattagaagtgttttggtctctctttagaaatttggtgattgttttgtgaccaaaaatacgccgtaggaacgtcattcttgtttatgtgtcaattagcttgtggcaaaattggttttgttacacatcttttcaacttaaagacacagctttctaacacctgttgatgatgttgagtgaggacttactgtactgactctcacacaacccccgttctttccagactctccgtgttcctcatacacgtctggtgtgtgtgtttttatacagctttctcactgtggagggttgtgcgtccgccacagtgaagatactgaacggctccaggactgtcaagttctggccttgaccttttatctccatcccaaaaccctgcctcagccggagtctgttccaaacccctggcaactacttatctgttctctagacaatgttacagtaatggaactgtacaggaggaaccctctgggagaaaccttcccccccccccccccagcaaaattccctggagattcacctgataaatacttttaaaaattctaacacttgggccgggtgcggtggctcgtgtgtaatcccagcactttgggaggccgaggtgagcagattgcctgaggtcaggagttggagacaagcctggccaacatggtggaactccatctctactaaaaatacaaaaattagccgggcgtggtggcaggcgcctgtaatcccagctacttgggaggctgaggcaggagaatcgcttgaacccaggaggcggaggttgcagtgagctgagatcacgccattgtactccagcctgggtggcgacaagagcaagactttgtctcaaaaacaaaacaaaacaaaaaaataattctaacccttgggtcgggcttgggttaggtgcggtggctcacacctgtaatcccaacactttgggaggccgaggtgggtggatcacttgatgtcaggaattagagaccagtctgggcaacatggccaaaccctgtctctaccaaaaaatataaaaattcgccgggggtggtggcacacgcctgttgtcccagctacttaggaggctgagctagaaggatagcttgagccagggaggtcaaggctgcagtgagctgtgatcacgccactgtcctctagcctgggtgacagagtgagaccctgtatccaaaaaatatatgtatatatattatacctctgctgcacaaagagaagcctcattagcaggtcaggtctaagagtagcttctaacctctggtggccaggtcagcctcaggaaggggctgggactgagtggaggggcctggaaacaactgcgcacactcgtatccattctcgggctcacaggagtgtgcgcggtaggagtaggcgggcctgtgagtgctgagacctgggagccagctggggccagtgttgcttcctgcacatcagccctgtgactagggtgagtcacttgggcagtctgagcctctgtttccttgctgtaaaatggggatagtaaatgtaccgacctatgtggggttcctgagagctgcaggtgggcgctacctgcagggcccttcaaatacaatagaatctcacaaataaaaggaaaagacgattttttcggcagaaggaaatgatgtaagtcacaaacttggatctttcctaaagaatcgaagagcatggagaaaaatacacgtgaagatttttttttttttcaagacagagtcttgctctgttgcccaggctggagtgcagtggcgcgatcttggctcactgcaacctccacctcccaggttcaagtgactctcctgcctcatcctcctgagtagctgggattacagatgtgtgccaccatacttggctaatttttgtatttttagtagagatggggttttgccatgttggccaggctggtctcgaactcctgacctcaagcagtctgcctgcctcagtctcccaacgtgctgagattatgggcgtgagccaccatgcctggccatgattcttttttttaatggttcttgcacatggtgggtgcacatattaacatgatcagtccattcagtccttagcccttttcccatttaccccagggatagtagttgacagcacttgtggctgtagcgttcaccccaagataactttgccatgaagcatctcatttttattattatttttgcattgctgtcatatatcaactttggaaataaaagacatcattttatgtatagcatcctgtttttagtagtgatatttccagttacaaaatatagtaattcttgatcactgaaaatgtcaaatcttggaaaatgtagcattcctacacttgatgttaacattgttctcaaacagttgttggccaaagattcatttgatgaatctgactgttccaaaatagacgattctggtgattcagacgattctgatgttctgtttagaaataactccaagaacagtttttatattttactttcacattgaaaatcagtcagatttgcttcagcctcaaagagtgtgtttatgtaaaattaaatgagcgctggcagcaagctggacttttttttttgttctaaatgggaaaaagttgaatcaaccctggggacaggtgctgtgtgagcccttttgcattaacttaaaaaaaatatgtgtgtgtgtgtgtgtgtgtgtgtgtgtgtgtgtgtatatatacacataaacatttttctaatgtaaaataaagcacagatccaagaaaccacatggccaacaaatggcttgaatctttattaagcagtcacccatgtgcccaccacccacatcaaaaatagactccaggagcacccccgcataccattccagtccctgcccctcactgtgagagtgtcctgacttcaggagtgaccgccacctgcactaatgacggcacagccacccaggtgggcatcgccaaatacatgactcagtctcacccccatctgggttgggtttgctttgctttgcttcttttctcttctcttttcttttcttttcttttctttttttgagacggagtctaactctgtcacccaggctggagtgcaatggtgcgatctcagctcactgcaacctctgtctcccaggttcaagtgattatcctgcctcagcctctcgagtagctgggactacaggtgcctgtgaccacacccagctactttttgtattttgagtagagacagagtttcgccatgttggtcaggctggtctcaaactcctggcctcaagtgatccgcctgcctcagcctctcaaaatgctgggattgcaagtgtgagccacggcgcccaggccctgggttttgttttctaatacatctcgtaagtctcctttcacctctgattccctccgattctagtccttactatttttgtcctgatgcccctctgcctatccctgtccctgttatttctgtgatattagcctcccaggtttgctcattcatttggggttacacaggaggatcaccacagcatttctcaccttttataagaagtggcccaggatagctgcttgattacagccttgattcctccctagtcacggcctcagagtgatgaactgctttcatatcatcttcccaaggggaccaattaggttgtttcctttgtttttttttagcatcttaatgaattcatggacttaaaatatatttgatgcgtttcaataccgtttctagtccttttaaaggtgaggggccaggcgtggtggctcatgcctataatcccagtactttgggaggccgagggggaaggatcacttgcatccaggagtttaagaccaaggccgggcctggtggctcacgcctgtaatcctagcactatgggaggctgaggcgggtggatcacctgaggtcaggagttcaagaccagcgtaaccaatatggtgaaaccccttctctactaaaaataaaaaaattagccagacatggtgacctgtgcctgtagtcccagctacttgggaggctgagacaggagaattgattgaacccaggaagcagaggttgcaatgagcaaagattgtaccactgcactctagcctgggcaacagagcaagctgtctcaaaaaaacgaaaacaaaaaaaaatgaccagcctgggcaacatagtgagacctcgtcagaaactagccagaagtggtggcgtgtacctgtacctactttggaggttgaggtggctggatcgcttgagttttcgaggcagaggttgcagtgagccctgatctcaccactgcactcagcctgggtaacagagtgagaacctgtctcaaaaaaaaataaggaagctgaggctcaggtcgaacccctctaacttactctaggacaagcactcataggtgagcttagcgtgctgttaggcggcagccagggtgctccagccccaaagccagccctttgcatgttctctgccttctgggcacagtggctgctgggcttcggtgtgtatttttttttttaactcagcatttcttggaagtgtttcagcatcagatgtgaacccatgtcctcatttttaagcaactgcaccgcttttccttcccttaccagggtctctaacaatggacatttgtctctagtcctccctgtaagtggtgttgacagcaaatgctcctgagtctgcgaccctcatgggtcaagctgagcccatcagaaggcctttccctggtggtctcaggcatgcacgtgttggggtgatcttttcagtgggttttctttcttgggctgctgaaggtctgtaaacgccctgaagaacagcccagagcaggatggtgttactctagtctcagccaaaacggggactcctggggtctgtttgtgacgtgggtggtgggcacacggctgggctttttctgtggatgtggaatgcacattcaccttgagttgcctccactgggcttagaatccagcactctctgagcctgggtcccacctgggaaaaggggcccccaggggctgtgtgtggagctggtgttggcacctgggtccagcgggcacgtgaccaccccgggttggaattgggactctgcttcctactagccaagcgagcctcagtgtctttgtaaaatggccatacctccctcctgggtttatcaggaggttagaggggaagacagaaggaacatgaaaggtgagaatctgaaaggcaaggtgctgaacagatgggcagtgccggagcacagtcagctgttcttgtttccatgtttcagcagtagagactcgtatggggaagggcgtttggggaagggtctgtatggagcaaggtccagaattgaagcgggcctctgcgtgtgcttgacacgaggcctggttgggttaggagcgttcaccaccatgtggcgttcctccgcgtgttcaacctgcggtcaagtgctcagctgggctgggcagctgaacacggcccagggaactgcccctcgcagctggcagccgcgtggcagccagggtggatcgggttgagcattcccttcagagcagtcacgatttgcgtttatcccagcagtagcctcaggcatctctgcagcttttttgttggtctctttccttcctacgtttccatcggcttgtgggttttccttgtgagcagggttggcatagggttcttaaatacggggaacgacggagcccacatcaatgagggggacgtcgttatgcgagggtgggctgggtggctaggtcacagcaggattgtggcaccagcagtcaaagtaactgcaacttttttttttttttttttttttgagacggagtctcgctctgtcgcccaggctggagtgcagtggcgtgatctcggctcactgcaacctctgcctcctgggttcacgccattctcctgcctcagcctctcccagtagctgggactacaggcgcccgccaccacgcccagctaattttttttttgtatttttagtagagacggggtttcaccgtggtctcgatctcctgacctcgtgatccgcccgcctcggcctcccaaagttctgggattacaagcatgagccactgcgcctggccataactgcaacttttttggtaggatctgatgttactgcttagagacggggtcctgctctgttgcccaggctggtctcaaactcttgagctgaagtgatcttcccgccttggcctcctgagtagctgggattccaggtacacaccaccaggtctgatactattttaaacagaaatccaggtggcattgtagggtcatttgcattaaagccttcctgttgtcgaccacagccatgacattatgactttcaagcttgtgtccagagaggggttcacagagagaagtctccctcatgagaggaagactgtggatcagagataggcaaacttgatctctgaggggccagatgggctttgtggaaatgactcaaacccctcttgtgcaggcagccacaggcagtgcgtacacaagtggatgtgactgcaggccagtgaaactttatttacaatgggatggctaggcatggtggctcacgcctgtcaccccagtactttgggaggttgaggtgaaaggatcacttgaggccaggagttcaagaccagcttgggcaacatagcaagaccccatctctacaaaaaaatttttaaattggccctgcatggtggctcacacttgtaatcccagcactttgggaggccgaggcgggtgaatcaccggaggtcaggagtttgagaccagcctggccaacatggggaaaccccgtctctactaaacatacaaaaattagccgggcatggtggtgcatgcctgtagtcccagctactcagaaagctgagacaggagaattgcttgaacccgggaggtggaggttgaagtgagccgagattgtgccattgcaccccagcctgggcgacaagagtgaaactctgtctcaaaaaaaaaaaaaaaaaaaaatttagccgggtgtggtggcacatgcctgtggtcccagctactgaggaggctgcggtgggaggatctcttgagcccacgagtttgaggttgcagtaagctgagatcatgccactgcccttgagcctgggcaacagagtaagacactatctctaaaaagaaaataccaaaccaaacaaaacacaggcagtgtgcagactggctgtggcttgccactccctggcctgaagcctggcctcttccagtcagggaacatcaggggttccagcttctgccagtttaagtcatcttttctggtgtatttcaaagccttactgtgagtatgggattaataggcacaggaagggacctggtgtgtgacagatgggtgggaggcccattcattcacacaccccgggacttgcagtgacttcctgtgtattggattcttccgcctctcattcgcatccatgatgttgaattctgactctgtttaacttgtaatgtccacatgaagccattctaaaatctccagatccctctcagaaggccctggggatgaccagttaccatgtgtctttatctttgaaggaaatttccagaactctttgcacagttcaagtccttcctgggggtaaaagagctgtccttcgcgccacccatgagcgacagatccggggacgggataagccgggaaattgattatgcatcctgcaagcgcataggatccagctaccgggcactccccaaaacctaccagcagcccaagtgcagtgggaggacagccatctgcaaggaggtagcgctccctggggctcaaatgttcgttgacatggtgcatcccccacccctccccagcaaacacccgatacccccgttatgaatgaaatgctgtgtgctcagccctcctgaatgttgggttatgggtggtgctgggatgtggcccggcaaaaccacctgagcagagacaacagtgttgtaccctgctggtagttttggcaaaacacagagtgccagggataacgtggagttcggcttattcatctgttatttgacttaggtttattgctgccatgattctgctctgtcccgggctcactgacctcagtgtgtttctgtttagcttgaccattggacacttctccagggttcgtggacagacgattactgcatgtccaagttcaagaatacctgctggattccaggatatagtgcaggggtcagcaaactctggcccacgggccctggcccgctgcccgtgtttgtaaataaagttttactgtcacacagacacaaccattcctttacatattgcctgtggctgcttttctcaccacaaaggcagagttgagtattcatctgggatggcctgcaaaatctgagatggttgctgtctgaccctttgcagagagaatttaccaatgtctgaaatgaaatcggccctccggatctgcaagttcctcatctgtggtttcaactaaccatggattgaaaatacgtggggaaagagaaaccaaaaaatgacaatacagcaataaagcgtaatccacattttaagaatgcagtgtaacaatgatctacacagcatttacattgcattaggtataagtattctagagatgattttgcataggatatatgcaaataggattccattggacatcagggacttgagtatctgtggatttgggtcttcaggggtggttctggaaccaatctcccaggataccaagggagtgtccacttgaccaaagtcatgtttttccttaaaaactttatgcaccttcccatttgtataaggcagttggtattatgtatcaggatggtattatgtatcttggtactttctacactggctaacagtaaatcttggctcctggggcatgcagcgtcattcacggcatttcctcttggtgcaggtactgaacgacacctgggtctccttcccttcctggtctgaggactccacgttcgtcagctccaagaagacaccgtacgaggagcagcttcaccgctgtgaggacgagcgcttcgaggtgtgtgtgctgctgtggccgggtcccccggcatgtgcctgttccccttctccatgggacatgcatcctgatcctcctccactgccccagtctcgtttggaggagcaggaattgcagcacattccaacagctcctggaagcttcctgccgggtcttgctggcctttgggctggctaccagatggcacttttctttctgtttaaaaattttgtttgggctgggcgtagtggcagacacctgtaatcccaacactttgggaggccaagacaggtggatcatttaagctcaggagtttgagaccagcctgggcaacatggcgaaaccccatctctaccaaaaatacaaaaattagccgggcgtggtggcgggcgcctgtaatcccagctactcgagaggcagaagcagtagaattgcttgagccagagaggccgaggctgcagtgagccgagatcacaccactgcactccaccctggacaacagaatgagaccctgtctcctaaaaagtttctttaatgtaaaaattaaatttatttttattttatttatttatttattttgcttgctctgtttcccaggctggaagtgcagtggcgtaatcatggatcgctgcagccttgacctcccaggctcaaatgatcctcccacctcagcctcctgagtaactggaaccacaagtccatactaccatgcccaagttgttttttttactttttttgtagacatgaagtctcactgtgttcccgaggctggtctcacactcctggcctcaagcgatcctcccaccttggccttccaaagtgctgagattaaaggaatgagccaccacacctggctaatttttttttcctttttttagagacagggtctgtattgcccaggctacattaatttttgtaattaaaagttttattggctgggcacgatggctcacgcctgtaatccctgcactttgggaggctgaggtgggaggactgcttgaggccaggagttcaagaccaacctgggcaacaaagcaagagcccatctatacaaaaaaaaaatttttttttttttttgagacagagtttcactctgtcgcccaggctggagtccagtggcatgatcttggctcactgcaacctccacctcctgggttcaagcgattctcctgccttagcctcctgaatagctgggattacaggcacaccaccattcctggctaatttttttatttttagtagagacggggtttcactatgttggtcgggctggtctcgaactcgtgaccttgtgatccgcccatctcagcctcccaaagtgccaggattacaggcgtgagccaccgtgcccggccataaatttttttaattagccaggcatggtggtgcacacctatattcctagctacgtgggaggctaaggtgggaggattgtttgagcccaggaggttgaggctgcagtgagctttgattgtgccacagcactcaagtctgggtgacagagcaagaccctatctcttaaatacacacaccccccccccaaaaaaatcctctggtctctgaggtcccaggctcctctctgaggcctcttgagttccccagtggctgaccccgtcctgccttcctttccatagttagacgttgtcctggagacgaacctggccacaatccgtgtgttggaaagtgtgcagaagaagctgtctcggatggcgccggaagaccaggagaagttccggctggacgactccctgggaggcacgtcggaggtgatccagcgccgtgccatttatcgcatctatggcgacaaggccccggagatcatcgagagcctcaagaagaaccctgtcaccgctgtccccgttgtcctgaaaaggtgccctgtggcgtcccgacttcccttccccttccccttcccccttccctcccctcccctcccctcccctccccactgcagggagcccttggagagctcattagtgctgtttgtcaacaggtgtcatctccaggggtggtctctgaggcctaagggtgccttcctgtatttcccagtctcccactcctgagaggagagcactgtgaccttctaggactttccaccttgcacataatacatctagacatctaaataactgctttaagagtcagatgcgaccactacactgtggcttgcattttatttaatgctgcatttcggatgccgtccggcgctagttaacaggcatttatcaagtggtcactttcaggcaggtgcagtgcttggccctgggattatgcagctgagtgaggcagacccagtccctctcttgggactcacagctgagcaggggacctgagtggttgagccaacagccatgcggagagtgctgggtgccagggaggaggtggaggaaccgggaagccggccacattggctctgtaaggccatcacgccctccctctgacgtgcacagagcccactgcacagactaggctgggagctggctgggcctgggtcctggacccccagtcaagtcccagaggaagacaggccagccctgggatgcttcagggaggatgccctggcttgtccctggtgctgacctctcttccccccgcagactgaaggccaaggaagaggagtggcgggaggcccagcagggcttcaacaagatctggcgggagcagtatgagaaggcgtacctcaagtcccttgaccaccaggctgtgaacttcaagcagaacgacaccaaggccctgcgctccaagagcttgctcaacgagatcgagagcgtctacgacgaggtaaagccttccctagccctgccggccggtgggggtggggtcctggctctcccgaccgccgggtctgtgcctctgtttccctggtggttaggcagggtagtggcattgccctttcagggctgtgttgaggcgagggttcatgtctctgtgatgcccagcctgtggcctgccctaggagaaccagcaactctgccattgtctatctgtttgtttgtttggagacagagtctcgctgtgttacacaggctggagtgcagtggtgtgatctcagctcactgtaacctcagcctcctgggttcaagtgattcttctgcctcagcctcctgagtggctgggactacaggcgcacaccaccacacccagctaatttttatatttttagtagagatgggttttcaccatgttggccaggctggtcttgaactcctgacctcgtgatccacccacctcagcctcccaaagtgctgggattacatgcgtaagccaccgctcctggccgactctgccattgtctagcgaagtctccgtccctcccgtggggcagtgatggactttggcttaggtagtgggtggcagcagccttcatttctttcttgccgactgtgccaggcaccggtgttagcaacacagaaagagtaatgcatcatctgacctcactcctgaacctgactctgctgcggcattattctgattttaccagtggggaaactgaggcacaagaggttgcatttgcctgggctggtcgcagggggccagggctctgagtcattgggttcgaggctttcggctgcatgtcctcactgcaggctcacaaggcctgagtcatagaaccaaggccagcggggccctcaggttgccaggagctgggcctgttagtagctgtgtgtagggagtgcctgcttgcaggatcctgaggtgggaagcttggcagggtgccgggcgtggtgatagccagctgtcgggaaggtccttggacactctgaggaggtggcttaggagggcacactactccccaggcagtgcccagatcatggcacgggctgcgttatcagcctggtgcccacctgggcagggggtgttgcctcacctgatttggtttcttgctcctgtcactgcacagtgagcggtcgctccttcttttacaacacagaaacggaatccacaggagccgggctgctggcccaaggcctctcccagagcctgtgggactgtggggacccccttccctcccacctcccttcccgtgggccaccctcgccccaggcccacccacaaccactctggcttcctcactctagtcctcggcgatcctcaagcccaagaccccgtataggttctgtgggtctgtggtgtctgcaaagtgcagatgatgaagtagccctggaaatccaccaatgcgaccctgagttcctggatccctccctggggctggggctgacaaagggaggggcaccaaggttcatatgcagatctctgcacatgcaggtccttgatgaattccaaagtcagaaccccattccatcacgtgatttacaaagcatggttacagatcatggacatggggaccctgcttcagaggggactgtaaaggaattttcagagtgtttatggcataaatgagacctgggggacttaggaagcagtcagagggcgatggtcacactgaagagcccagagcagggctgagcgtgcagactcctaggaaccaggtcagtgtgcttggccctaccagcctctaagccgccttgcaggggaggaggaagggaaacctcaggctgctaggagacccggtccttccctcgggagcctgcagagatggcatccacgctcattttccccaagagccctgctgcgtctgcctccctgccttggactgagggggttggggctgcccagcagaggccctgggtgccaggacagtggtgtgggaggctggaggaaggggtgattgtctaatggtgtgagggaatgaaagtcatgatctagataaagaccaaggggaggggtgagcctgggacagggttttccagggagtgagagcagatgggcatgtgcaaaggccctgcacacgcaggagggagcttggcgcggtgaggctggaggagctgtggaggggcacatcaggggccggcgtcttctgagcagcctgggaaagcctgaagggcattagttggggtgaccatgctcctgtgggccaagtcaccctggacccagtgaggagagtggttggagcaggctggtgggagctggtgggagggctggtgacatgatggtggtagcaagcacgtgcaggggctggcggggacagcagcggaggcgggggcttggtgacgatgggcgtgcaggtcttcagatgtgagcagttgcaggccttccgggtagtagatggagggcagaggcagagaggtcacggctcaccctttgcctccttgacttcatcgatagcatggtgtgggcagccccggtcgagctggaatcaggcgccaccgttgctttcagtaggaggaggtcagcctcagaggcttctccatgctgagccacggggccccgttctgtcctggagctgggctgagcgacagacccaggcttgacgctgtcagaccccctgtgaaccccgccccacatctcagaatcctcttggctcctttgtctggggtcccgggatgacttgggtctgcctcactttcggagaggggaccaggagcacatggggctgcacaagaggttgaggcaagcgacctaccccccaggccctgctgcctcaccgatgttcgccacccatcctgctctgggcagcgctcatccaccttggtggcccagttaacagcgagtcgtgaatgggcactgggggtcctctgggtgctgggtggctttccacctaatggccgcccttccccccacagcaccaggagcagcactcggagggccgcagtgccccctctagcgagccgcacctcatctttgtgtacgaggaccggcagatcctggaggacgcagcagcgctcatcagctactacgtgaagcggcagccggccatccagaaggaggaccagggcaccatccaccagctgctgcaccagttcgtgcccagcctcttcttctctcagcagctggacctgggcgcctccgaggagtcagctgatgaggaccgggacagcccccaggggcagaccacagaccccagtgagcggaagaagccggcgccaggaccccacagtagccccccagaggagaagggggccttcggggatgccccggccactgagcagccacccctgccgcccccagccccgcacaagcccctggacgatgtctacagcctattttttgccaacaacaactggtacttcttcctgcgcctgcaccagaccctgtgctccaggctgctgaagatctaccgccaggcgcagaagcagcttctggagtatcggaccgagaaggagcgggagaagctgctgtgtgagggccgcagggagaagggcagcgaccccgccatggagctgcggctgaagcagcccagtaaggctccaaagcctgccgggaggccccggggggtgcctggggttaggggtcacagctcatgatctgacatgtcctgttacttttctttctggcttttcattttaagagaattctgtgatttcaaatgggaaattgcaaacaggaagttgccagcataagacagaggtctcacgtacccctcgcccaggctcccctggccgtggcacctgtcctgggtgtagcaccctctcctgactggggaacatttgtttctcatgggctttctcgtggagccgtcatggcccagctccacagtaccctttttctttctttttttttttttttgagatggagtcttgcgctgttgcgcaggctggagtatagtggcaggatctcggcccactgcaacctccacttcccaggttcaagtgattctcctgccttagcctcccaagtagctgggattacaggcgctcaccaccatgcctggctcattttttgtatttcttttttgaaatggagtcttgctctattgcccagcctggagcacagtggcatgatctcggctcactgcagcctccgcctcccaggttcaagcaattctctgcctcagcctctgagtagctgggattacaggcacccaccaccatgtccggttattttttttttgtatttttagtggagacgaggtttcaccatcttgaccaggctggtcttaaaactcctgaccttgtgatccacctgcctcgggcttccaaagtgatgggattacaggcatgagccaccgcgcccagcccaattttttgtatttttaatagagacaggatttcaccatgttggccaacctggtctcaaactcctgaactcaggtgatccgcctgcctcagcctccccaagtgctgggattacaggcatgggccaccatgcctggcctccacagcattctcgctgccatccctgggttgccggccagattaggcagcctcggagggtggcagtgaacaccagctactcgggtttcctggtgattcccacatttgccccaggggtggcaggtgagggctgttgggccccatgggggcatttgttggggctctgtcatgccagagtttggcctgcgtgactttgcgctctccaggaggcatatggatgaggcggtgtgtctccgcaggtgaagtggagctggaggagtactacccggccttcctggacatggtgcggagcctgctggagggcagcatcgaccccacgcagtacgaggacaccctacgcgagatgttcaccatccatgcctacgtgggcttcaccatggacaagctggtgcagaacattgcgcggcaggtgagccgggccggggtggggccggccctgaggacggcggaaatggctctaccatcatttcactccccgctcgggagggggcccgtggtcagcacagcaaacctatcctgttttttcttaattgagacaaaattcgcataacgtaaaattaaccattttgaagtgtacagtttggtaacatttggtacattcacaatattgtgcaaccaccacctctgtctagttccagaacatttcatctttccaaaaggagaccccatccccatcagcagccactgcccattcccctgccccgagcccctgacatccagtcaactgctttctgcctctgtatttccctcgtgcttcattcctttttatggctctgtaatactccattgcgtgggtagctacgttttgtttctatctcttggtggacatctgggctgtggctgccttatagagattgtgagcaatgctgctctgaacatttgtgtacaagtttttgttccgtgtccctgttgacaaacctttcttgaggttaaattgacaacatggaaaaaaccttaacccacttatcctgagggagggtgggaatagtgatttcatctgcgttggttttagtagtagcaaaaacccaggccccactgaatgtcaacacaaggaaactggtcacgtaaatataaacagcagacgtcccagacgagctgggtgtggttccaggacatgggtcctgcctggtttctgccagaatcattgttcatggtgacctccatttcctggtcaccaagtaaggctgttcatcataaagtggaaaaaaagctggaaaaaaaataatgccattactctcccacccagacacagccacgagaagcatttcagacaggacgtttccttccaggttttaaagactgcttaatggagctaaaatacccaagcagaaaagtccccaaatttgaagggggcagatggatgggcttttcatcaacagaacccctgcccctgtgtccccacccagccacctgccacccatggacacccacaaccctgatttctttttcttcttcttctttttttttttttgagacagagttttgctcttgtctcccaggctggagtacaatggcacaatctctgctcacagcaacctctgcctcctggtttcaagcaattctcctgcctcagcctcctgagtagctgagattacaggtgcgcaccaccacgcctggctaatttttgtatttttagtagagagggggtttcaccatgttgggcaggctggtctcgaactcctgacctcaggtgatccgcctcccttggcctcctaaagtgctgggattacaggcgtgagccaccgcaccggcatcacaaccctgatttctacagagaggtagatccctggcctcgagctgtgtgttaacagcagcacacagcgcccagccgcatcctgggagcgtcattctgtgagattcctgtgttgagatgaaccggccaaggattccgaggaacgacccccgattccgtccacctgtctcctgaggacaggcatgggcggtgccccgtgggtgtgtctgcggtggccgtctatgtacatttctgctgctgcccttggggtaaggcacagagaggtgtgtcccgctgatggcaactttccgtttcctgggtcactcgtaccagtgctgtgcgaggccgcactctgtgtcctccctggggctcaggggcgtctctccatcagctgggagttcaaatctcggtgggctcacgttgcatttccctgatggcaaatgtggctggggccctgtcctttcatggccgttgggacatcttttctcatggaaagctatccacggtgtttgcgcctgtttccgttgcgtctgccttgttggtgactgggaggatttctgtgtctggccatgaggacttagtgaaacccatagctgcgttctgacaccttcgcttcagccccctccactttccctccgtgtgcccgaaatgggtccctgcccatcaccatccacagcagtggccactccccaggtgagggaaacacgcacggggcagcctggagagaggacacccagggcccagcacatggtgttggggaagtgacgcaggggacgccagggggctggcagtctgtcccctccccccccccccaggctgggcacccctcatgggccatggcttcggggacagcaaccttgcttgtgacaccaggagattggaccagatggtttatggaaagcattgattaatgctttaaaaaaatcccccccttccataaacaactcctctagaacctgttaaaaacaaagcaatgaaaatggggctgtctggctggagctgtagtgagagccacatgctgccctgctgtcccagctgtggctgcaccacaccccagctgcatctccctgggccaggtgctcactgcgggcccctccacactgtttgtaacctgcctcgaggccatgtctggactctgcctccctttttcttaaaaattagcattgctgttttttagcagtagcagttggcattcagtgggcacttgctgtgtgccaggtactgtctgaaacctatgcgtgtccaggtgttattgtatccattcaacaaagctgcacatggaacccccaaggagtgtggtcccctgaccagggcctgggctgtgcaggcgggtgattcacacagccctgtctgccccacgatccctgctgtttccattccttccttcttcagtgcaaaggtaaaaggagtagcagtgtatttacagccaagcatttaggggaaaggaacagcctgcactcaggccaccttcagctcattcctgggtttgctttggaacatatttttccgtgtcttttctgtgtgtttctcacacccgggcagggtttgctggtctggcctggtctgttttgttcaggtctggtctggtctagttttggtctggtctggtctggtctagttttggtctggcctggtctggtctggtttggttttggtttggtctggtttggtctggtctggtctggctttggtctgatttggtttggttttggtttggtctgatttggtctggtctggttttggtctggtctcatctggtctggtgtggtttggttttgatttggtctgatttggtctgctctgatctggtctggtctggtctggtttggtttggttttgatttggtctgatttggtctggtctggtttggtgtggttttggtttggtctggtctggtctggttttggtctggtctggtctgatctgatctggcctggtttggtttggttttggtttggtctgatctggtctgtttggtctggtttggtttggttttagtctggtctggtctggttttggtatggtctaatctggtctagtttggttggttttggtttggtctggtttggtgtggtttggtctgatctgatctggtctggttttggtctggtctgatttgatttggtctggtttggtttggttttagtctggtctagtctggtctggtctggttttggtctggtctaatctggtctagtttggttggttttggtttggtctgatctgatctggtctggttttggtctggtctgatttgatttggtctggtttggtttggtttggttaggttttggtttggtctggtttggtctggtctggtctggttttggtctggtttggtttggttttggtttggtctggtctggtttagtttggtctgatctggtctggtctggtttggttttggtttggtctggtctggttttggtctggtttgggtctggtctggtctggtctgtttggtctggtctggtctggtctggtctgtctggtctggtttggtctggtctggtctggtctgtttggtctggtctggtctggttttggtctggtttgggtctggtctggtctggttttggtctggtttgggtctggtctggtttgggtctggtctggtttggtctggtctggtctgtttggtctggtctggtttggtctggtctggtctgtttggtctggtctggtttggtctggtctggtctgtttggtctggtctggttttggtctggtttgggtctggtctggtctggttttggtctggtttgggtctggtctggtttggtctggtctggtctgtttggtctggtctggtctgtttggtctggtctgtttggtctggtctggtctggtctggtctggtttggttttggtttggtctggtctggttttggtctggtttgggtctggtctggtctggtctgtttggtctggtctggtctggtctgtttggtctggtctggtctggtctggtctggtcggttcggtctggtctggtctggtttggtctggtctggtcggtttggtctggtctggtctgtttggtctggtctgtttggtctggtctggtctggtctggtctggtctgtttggtctggtctggtctgtttggtttggtctggtctggtctggtctgtttggtctggtctggtctggtctggtctggtctgtttggtctggtctgcccacagcctgtcaggattctggtctcttcatccctgtgtcatgcactctccatcctgatgtgtttctggcctttgtcgacttcctctgtgggtgaggtggggactcccgcaggaggcggggtggccgcaccacctgctttcctcccgccagctgcaccacctcgtgagcgatgacgtctgcctgaaggtggtggagctctacctgaacgagaagaagcggggtgccgctggtgggaacctgtcctcccgctgcgtccgcgctgctagggagaccagctaccagtggaaggctgagcgctgcatggccgacgagaactgcttcaaggtgagaggaggcctggggctgggaacacgccgggaggcccggccgctcactccgctctggactcagtcctgggtggaccctggttcagcggctgggacaccggccctgctgcagagcccatgaggtacctttgacctgcaggaagcatcagggctttgggagggtggcaaaggcgggaggcgggtggccttgcgagcctgcgctgtgccggctgggctgtgccggcagtggaggctgtcagcgttcctgctccgcaggtgatgttcctgcagcgcaaagggcaggtgatcatgaccatcgagctcctggacaccgaggaggcccagacggaggaccctgtggaggtccaggtgaggccctggccccagtctgtgccacgcataccagggagcgcctgagggcagcagcatggggctcccaccagccaagcgcaggccgcgcagcatccagagaccctccctctgcaggccacaggctctccttgaggcctggtgggtggggttgcctccctccctgctcccccaccaggctctcttctgtgccccctctccaaagagcagaccactcctcctgagcaagcggttgtgtcccagggcaggaggggaaccaagccacctctccctggcccccgactcccactcagggcatcccgtggctgtgacctctgcacctcttgtgtcagggctgcatcctgttcctaatccccagcagaggagccacctgggcccagctcccagtcacaatttttgcggggacagatgtttcctgctcacctcccgcatcctggtgacagtgaggcattgacccgtgtgtgtccccagggtggtcattggggcctgcagctcccggcacctgccaacaggtccagtgtgtgtgcacattactcagctaggccaaccccattcatttcctggggctaccaccacaatgaccacaaaccacgtggcttcaaacaacagaagtctattccctcaacgtcctggaggtcagcagtccacaaccacagtgtgggccgggcggtgctcctgccaaaggctctggggcggatccttcctgctcttccagcttccgggggcttctggcgctcctcagctgtggcctggttgtgtgagtcccgctgtcactgggtcctctgtcaagagctatagtctgttggggtctccgtcagggatcagagtcctctgcagcggctctcctcatgctctggcagtggggggcacagaacccctgtgagctcctgaactcagagtccagagtaagagtggccatagccctgctgtaggggcatcacgggctgtgtctctccctgtccccagcacctggctcggtacgtggagcagtatgtggggaccgagggcgcgtccagctcgcccactgagggcttcctcctgaaacctgtgttcctgcagaggtaagaggccctgagatgcatgctctgttccttccttcctgggcccagggagtgtcccctttgtcctgacgggggctggaccatggcacactgtctgggagcacttagtaggtgcctgctgtgtgctgaggcaggccctgcccttttgaggcttgtggtttgcagtggagggattagtaaccccaggacggtgaggtgtaggaggggcaaggccaaccccacgatgcgtcagtgggtgaagagtgaatgcccggactggagggagacgctgccagagctggtggggccaggccagaggcgggtggctgtggcaggaccctggaccacctcaggtcgggctaggatggcacctatgggaccagtgggggctgctggtgggtgttcagatctgggggcatttcttgttgcttccatttgctttctgtggacccctgggaggtagcacatcttctgatggtcccaggcctgggggtttcccagcctgcaaatcctcctcccacaatgccgagagccagagtccattccacctcctttcgcccccaggaacctcaagaagttccgccgccggtggcagagcgagcaggcgcgggccctgcgcggtgaggccaggagctcctggaagcggctggtgggcgtggagagcgcctgcgacgtggactgccgcttcaagctcagcactcacaagatggtgttcatcgtgaactccgaggactacatgtaccgtcgcgggaccctctgccgggccaagcaggtgccaggggaggcctgggctgccccgacatgcccctcctcaccccaagtcctggggccctgggggtccagccctcagctgccctgacacccggcctcttcaacaggtgcagcccctggtcctgctccgccaccaccagcactttgaggagtggcacagccgctggctggaggacaatgtgacggtggaggcggctagcctggtgcaggactggctgatgggtgaggaggacgaggacatggtaccctgcaagacgctgtgtgagacagtgcacgtgcacggcctgcccgtgacccgctaccgcgtgcagtacagccgccgcccggcctcgccctgacccgccctcatgggcaccgggcaggcgcctcacagagcacagacgtgccctcggccttggtcgtgtcggggccgttttcttgaacgacgtgagaggcatctcccagcccctctgctgccggacagcgcactccagggcaggacgccgcccccgtggctcccggtctcctgtgggcctgctgtgtgccaaacctgagctacctgcacccgagccctggggctcagccccaccacaggggcgggtggacgtgctggccgaggaacaagcaatcatgtttgcgtccccgtccgtcacatgtgccaaatccctggcaggcagatggctcctgccccatattcttgccgtgtcttggaaaagtcacaggtgacagccctcctgaggcccacactttggagggggtccatgtccaagagaccctgacaaggaaggagttgagccctgggtaggcttgcttgaaaagtgagtccttccagaatattctcagagctgccagaaacatcatctgagggtttgggcatcagctctgcctggctggtgttcaggccctcagtcactttggaagtgagaagaacccttcagccaaacctttgggatcccattttgaagtccagagctggagcaggcgggcagtgccctgggagaccccgctctggataagacacccaaccccaactccagcagctggactctgggcccacaaggggagggaccccagccagtattccctcagagccggcacgaccctgctgtggggcggcgggcccagtcgtgttcctgcagtgggcaccctaggcgtatgtgtatacacgcacagatatttattcctttcgcttttagtggttgttatttctgtagcagccaagtcctgcggctccctggggctgagatctccctttgtggaactccgagagccgccctgacagtcccagccgccacccaaggagccccatccgcccacccaccctgggacccacgcggccactccagggatcattgttgtccttttgtgaggggctgaggcgactgtcccatggaggcatccaaggctttctgtgccaagaatcccaagtgactggggctggggaccacttctccaggcctctctccccgaccatgagagcccctggccctggcccctgcacaccagtaggcccagaataaccgccacccttgccatcctgcaacagctggactcaagtttccaggaagtggagatgtgtttctagaagtttcctgtggaacctggaggctcctgatgcctttgactccaggctgggcgattccgatgctgacccgtcctcctgggctccccacccccgctccccaagtgtcacacaggcactttgtacacatcctggttttctaagaagggaacttgccatcaagattcctgtaccaggcccacggccgtctcgggcagagccacctgggccccgggtgcagccggagaccccgccgagcccctcctcccagtattcccatccccgcatgcttctagggagcgcctcttttccgttcttgaggaatttctgttctggggcttgtccttcctttgcagctgttttgaatgtagttttccttttctatttatttgcacattaaagttaataattgaatattgacatcaagccgtgagggtgtgttggtcttcctgtgagagccttgctgacttcctgccaccaggtcagtgggctggacccatgagagcaaggggtggctgggtgtgcctacctgggaccaggggagtcgaagcccctccttgaaccaagatcatctcacaccctgcacctgccccgccacgacatgggagtgtcttctagaatattctttccccattccatttgcacatttagtgggaattagaagcgtctccttcgcccgagtgtctctcatgcagaacccaatttaaagatcatggtgtttgctctaaggtgtttgttctaagcttcccatgcccaacctatccgtccaggcccatgcctgcccacccaccccacacgaccaccctctgtactccttggggccccacccacttcctggctttcaccatcattttctcctcatctcctgccccctgtctgcatcccaagctccacacctgcttccgggtagcagaagccccagctctgctgtgtcccctggctgacatacctggagggttccaaggcagaagtggccagcccctccccctcagtatgggctcctccatcctctgtaggggaggggccatagcttcctcccagtgacccatgtgctccctgtacacccaagcgtctctggcagttctgaccacacccccaccggagggtcagggctcccagggagcgtggcaagccagaccggaggccgccctgtttccttctgccttgatcccatggctggggatgcccagggtcctctgtgggcccccagactggctttccttggtcagaagtgctgcaggggctgggaaaggctgtgctggtcccaggagagcagacaaagagcagatctccgaggtggccctgccctgaggggtcccctgccctcaagtagggcccatggccttgatgaggtgatatgacatgagttgagagaggttcctcactggccctgaagatgtctccgctgtgctggggaggggaccctgtggcaagggacagagagtggcctccaagagccaagggggacctcagagccaccactaccaccaggacccaaattctgcccaagtccacttgggcccagaaaaggcccccgagcagcagataaggacacagcccagctgacaccttgatctcagcctcatttgaccctgaaccaaagacccagcctcccaggctggacccctgacccacggaaacaaaaggtcatagaggcgtgtggctgtgagccacattcattatccagagatagatacagcagcattaataaagccgctgcatgtccagcacctccccttccacctccgtcaagtacggggaggtggctgagggtctcaggaacccctactgaggggggaaatgaaagaaaaaagaaaaaattaaaaagagaattaagcttttcctgtattaggctgacttgtctcagaggcagcaacaggcacagcccagacccaggaaaagtcttaataatactaagaagccaagacacaaaggaatgtgctctggagcctctcccagcactccctcaacatagggagaagaaaaacaaattttcctttgtttcatggtatgagtttatagattcctgctctctacacctagtgacttcaaatattctgttttatcagcagtggagtgaaggtcataaactgtctgagcagcctgagatagagccacctgggtgccatagtgatggccatggaataagccatgctaagcactagggcaaacctacataatggccatctgagttgcacagcaacggtcatgtctaatcctgagttatgagcctgttataatttgattaactgtctttgtcctgcctctgtatccctgctttcacgccactgtaagcctgcttcaagctaacccacccctttttaaaagtgtgtttaagtcaagtgctgtctttattctaggcccagtttttagacgttgagtccagtgggtctgagtgcactcaataaagatcctcctgtatacaccccaaggtctctcttttcctcctgtttccacaacactacatgtgatgctgacagagggtgctgggacaggggcttccagtggggccccatgaacatttattctgttgctagtgaggtgtttgtctcactggcttttgcaacatataaccagtgcttcccgcctgatgtcctcacttgctgagaatgaggctaactactccaaacagcaaactgaataccatccagcaatcacgttcctttgtatttgcccaaaggaactgaaaacttgggtccacacaaaaacctgcacaagagatatacgcagccttattcaccagtgcccaaactcagacacaaccaaggcgtccttcagcgggcaaacggataaaccatgtcacctccagacaacaggatataaaacgaaatgagccatgaagctgtgaagacatgaaggggccaggcgtggtggctcacacctataattccagcaccttgggaggctgaggcaggaggatcacctgaggtcaggagtttgagaccagcctggccaacatggtgaaaccctgtctgtcctgaaaatacaaaaattggtcaggcgtggtggcacgcgcctgtaatcccagctattccagaggctgaggcaggagaattgcttgaacctgggaggcagaggttgcagtgagccgagatcacgctactgcactccggcctgggtgacagagcgagagtctgtctcaaaaaataaaagacacaaaggggcctcaaatgcatctaactaagtgaaagaagccagcctggaaaggctgcacactgcatgattccaactatagaacactctggaaaaggcaaaagtatagaggcagtgaaaagatctgtggttgccagggggcagatgggaggaagtaatccataggtggaggtgggaggatttttagggcagtgacgcaactgtgcgacactatggtcaatggtggacatatcatgacacatatgtccaaacccatggaaggtacagtgccaaaagtgaacccccatggaaacgcggggttccagaagacagagccgtgtccatgcagctttgtccgttgcaacaaaggcaccgcttttggtaaaggacatagatagcgggggaggcttgcatgtgtggggtggggttacatggggactctgtaccttctgctgaatttcactgtgaacctaaaactgctctaaaaaataaagttttttttaaaaaagcaatttgacccaaagtcagtctcaggaggccagggggtgggggacagaacaggccagggcaggaacttgcagggacgggtgcaggcaggctgaggtctcaggaatgtgtctgcacctctgtggtttcccttctcttcttcccttctggggacctttgcaatctgggctggctgctgggtcccgcctaggtttcagattctgccccaccctgaggttggccagtcccttctctctgtggctctgggagtggagcctcagcccttggtacagtggagcaaacaaactctgatttggggccccagagaggaagcgctgggaatccaggggttggacaggctggaccccaagccctgcttccaccatggctgtccgtgcgaccctgggagtgactgtcagtcctggtgagacagggtcacagcacctgcctctcatggccattcaactgggttaatgtccctgcccagccagggaatgagaggaggtggcaccatgtttgctgctggagtgtaatggcgcgatcttggctcactgcaatctccacctcccgggttcaagcgattctcctgtctcagcctcctgagtaactgggattactggcacgcaccaccacgcccagctaatttttgtatttttagtagagacagggtttcatcaaattggtcaagctggtcttgaactcccaacctcaggcgatccgcctgcctcggcctcccaaactgctgggattacaggcatgagccaccgcacccagcctgcccatgtggcttctaacttgttccctgaccctgaccttttgctggaggcagtgaaggcaggagagagtggaggccacatccaggagcttccagggacctgaggggttggaggacaatgaaatccaggacacgccactgacttgcgcctgtctgccaatttttccccatttaaaaaagttatttaaagggccaggtgcagtggcttacacctgtaatcccagcactttgggaggctgaggcaggcggctcgcctgaggccagaagttcgaggtggtgaaactccacctctactaaaaatacaaaaattagccgggtgtggtggcatgcacctgtaatcctagctactcgggaggctgaggcaggagaatcacttgcaccctggaggtggaggttgcagtgagcagagactgtgtcactgcactccagcctgagcaacagagtgagactctgtctccaaaaaaaaaaaaaaaaaaaaaaaaagttatttgaattgtggtcaagtttatcttaatgatttttaagtgttcagctcagtggcagtaagtacattcatattgtcaccatccatctccagaactttttttttttggagacagagtctcgctctgtcaccaaggctagagggcagtggcacagtctctgctcactgcaacctctgcctcccaggcgcaagtgatcctcccacctcagcctctcgagtagcagggaccacaggtgtatactaccacactcggctaatttttgtatttttttgtagagatggttgggggggtgtctcactttgtggcccaggctggcctcgaacccctgacctcaagtgatccacctgccttggcctcccaaagtgcagggattacaggcgtgaaccacctcacccagcccagaactcttccatcttgcaaaactgaaacactgtggccttaagcactcactccccaatccccctcccccagcctctggcaccccccaacccattctacttcctgtctctatggaggtgaccactccagggacctcccatgagtggaatgactcaggatttgtctttccgtgaccggcttatttccctcagcataatgtcctcaagattcatccacaatgtagcatatgtcagaattcccttactttttaaggctgcctttttttttttttttttttttttttttggcagagtttcactctgtcacccgggtgggagtgcagtggtgcaatcacagctcactgcagcctcgacctcctgggctcaagcaatcttcccacctcattttttgattttttgtagagacaagatttcactatgttgcccaggctggtcttgaactcctgagcccaagcgatccctctacctcggcctcccaaagcactgggattacaggcatgagccaccactctgaaacagcccggcctggctgtctgccctttttaagaaaataagattttggccgggcgtggtggctcacgcctgtaatcccagcacttcgggaggctgaggcgggtggatcacctgaggtcaggagtttgagacctgcctggccaacatgatgaaacctcgtttctaccaaaaatacaaaaattagccaggcatggtggcgggtgcctataatcccagctgctcgggaggctgaagcaggagaatcgcttgaatccaggaagcagaggttgcagtgagccgaaatggcaccattgcaccttcagcctgggcaacaagagcgaacctccatctctaaataaaaaatattttggccaggtgcagtggctcatgcctataatcctagtgctttgggaggctgaggcaggtgggtcacctgaggtcaggagtttgagaccagcctggccaacacgacgaaactccgcctctactaaaaatacacaaaattagccgggcatagtggcaggcgcctgtaatccctgctgctggggaggctgaggcaggagaattgcttgaatccaggaagcagaggttgcagtgagctgagattgcgccattgcactccagcctgggcgactgatcgagactccatcttaaaaaaaaaaaaagtttttatggaaagtaacacagtgcacagaaaactccaacagtacaaaacagacacatggtttcctctcctccaaagctgtcgcgcccagcgtcctccgggaagtacctgggcagtgtcgcctgggtacagcttgtgcctgacaggggcaatgtcatcgtcacctctgcttgctggggttcccccgacagcctgtgctgccgtgttgttcccggggaggggctgttggcgggcacctccctgctttgtgctgctgtgtggatatcctcccaaggacatcttcctgtgcgtgtgtctggcagaaattcctagacatggaacccttgagtataagggcatgtgcgtcactatgttttttttttttttttgagacgcgtttcactcttgttgcccaggctggagtgaggctggagtgcaatgatgcaatctcggctcactgcaacctttgcctcccatgttcaagtgattctcctgcctcgcctcccgagcagctgggattacaggcatatgtcaccatgcctagctaattttgtatttttactagagatggggtttctccatgttagtcaggctggtctcgaactcccaacctcaggtgatccacccgcctctgcctcccaaagtgctgggattacaggtgtgagccactgtgcctggcttttttttttttttttttttttttttgagtcggagtctcgctccgttgcccaggctggagtgcagtggtgtgatctcagctcactgtaacccctgcgtcctgggttcaagagattttcctgcctcagcctcctgaggagctaggactacagacgtgcgccaccatgtctggctaatttttgtatttttagtagagacgggttttcaccatgttggccaggacggtctcgatctcttgacctcgtgatccacccacctggcctcccaaagtgctgggattacaggcgtgagccattgcgcccggtcgtgcatcactattttgatgcatcatcttcaaaccaccctgccccagcatcactggactgccggtgtgcccagcctcccctgcacagcttcccactctgctcacagagaagacggtggaggggggagcccaggcgtgggttttccgtgtgctgagggtgtcctcagccacctttttccccaagtcattgacgtgaagctgattttctcattggtggccatggaaactgcccagaaatgggagcagggcctctgagaccctgccccagctagactctctctccaggcttcagtgtctcctcctggagctgggtgttgactctgtccaagactctgctcagtcacttcctggctgatccccgagtgctcaagtgtgtgatgagattagggctcccccaggcaggaaacggccacattggacccctccctcccccatccctagttcattttattttccccaatcctcatggctcccaactaggccctcctgctcccagacccccccaagccctgtcccccatcccctgtagcccagcgctgagcacactggggccagaaccacccataccagactcccccagggcacgacgggttgaggcctctctgaggcagggagggacaacactgaggggccttgtgcagaagagggaaggggtacccccccgagcttcagtttcttcatctgcccgatgagcccccatccaatggtacccaggagtggggatgtgctggggctagaggagggaggccccctggaggctggcttggggacccttcaacctggccacctcactcagggtcagaggtcagagcaggcgagccacacaccccgaagtccccccggtcctcggcaggtgctgtccccagcatcactgtctcccctacagatgcccgtgtgtcccctgggcaagagtgaagtgaggcactcatacaggggtgccttgtgagtatggggtcagccgaggatgctgaggggctctcgaggttcagccagagtccctgacgctgggctcgtgctgctctgggggtctgaagggaccctcgctattaccctctgggaggcgcccatccttggtttttttttttttttttgccgagtctcgctctgttgcccaggctggagtgcagtggcaagatctcggctcactgcaacctccacctcctgggttcaagcaattctcccacctcagcctcctgagtagctgggaccacaggcatctgccaccaagcccagctaatttttgtatttttatgagagatggggtttctccatgttggtcaggccggtctcaaactcccaacctcaggtgatttgcctgccttggcctcccaaaatgttgggattacagccgtgagccaccgtgcctggcctagcagggctcttcttatcctgctcaccagagataggaagtcggggggtgacttcaggaaaggcccagagcccgtgatgggcgtggggattggggtgaggacagggctgtcgtgagaacagtggctgcagatgtgagcggctggcaggaagtggccacttgaaccgcagatgcttcctgggctggtcagggaccgggggtgctggctgcagctgggacccccccccctgcatcttgctggcctggcacctgggtccctgggaggcgccacactggatatagccacgtggggcagcccggtctccataacccacactccagtcctcccacgggctggctggcaagcggccctggtgggtctgcgggggcaggggcagccttcctggtttatctctaccggcgcgatctgctcgtccgcctcggctccagaagctggggctcagggtccggcgaggcaggaagcctgaggccacagcccagagcagcctgagtgcagtcatgtgggggcgactgctcctgtggcccctggtgctggggttcagcctgtctggcggcacccagacccccagcgtctacgacgagagcgggagcaccggaggtggtgatggtgagtggtcctggctttggggtgcagagatggggttacatcagagatggagctgggggcccggagctggggagggggaggccgggaagttgcgggcttcagcccagcccactctgtatcccgtctctgaccccatagggctgggctattcccttgagtgtcatgtccagctgtttcccaccagggcagaccccaggctctgagcacctccctccctgctgcttctcgtcacctgccgaggcaggggctgactgaggtcccctctctctcccagacagcacgccctcaatcctgcctgccccccgcggctacccaggccaagtctgtgccaatgacagtgacaccctggagctcccggacagctcacgggcactgcttctgggctgggtgcccaccaggctggtgcccgccctctatgggctggtcctggtggtggggctgccggccaatgggctggcgctgtgggtgctggccacgcaggcacctcggctgccctccaccatgctgctgatgaacctcgcggctgctgacctcctgctggccctggcgctgcccccgcggatcgcctaccacctgcgtggccagcgctggcccttcggggaggccgcctgccgcctggccacggccgcactctatggtcacatgtatggctcagtgctgctgctggccgccgtcagcctggatcgctacctggccctggtgcacccgctgcgggcccgcgccctgcgtggccggcgcctggcccttggactctgcatggctgcttggctcatggcggccgccctggcactgcccctgacactgcagcggcagaccttccggctggcgcgctccgatcgcgtgctctgccatgacgcgctgcccctggacgcacaggcctcccactggcaaccggccttcacctgcctggcgctgttgggctgtttcctgcccctgctggccatgctgctgtgctacggggccaccctgcacacgctggcggccagcggccggcgctacggccacgcgctgaggctgaccgcagtggtgctggcctccgccgtggccttcttcgtgcccagcaacctgctgctgctgctgcattactcggacccgagccccagcgcctggggcaacctctatggtgcctacgtgcccagcctggcgctgagcaccctcaacagctgcgtggatcccttcatctactactacgtgtcggccgagttcagggacaaggtgcgggcagggctcttccaacggtcgccgggggacaccgtggcctccaaggcctctgcggaagggggcagccggggcatgggcacccactcctctttgctccagtgacacaaagtggggaaggctgtactgggtcgaacagggtcccttcccccacttcacgtccttcctgggacctcagaatgtgaccttatttggaaatagggttgttacaactgtcactagcggaggtcactttggagaagggtgggccttacatccagtgtgggtggtgtcctcataagataaggagaggccaggcctggtggctcacgcctgtaatcccagcactttaagaggccaaggcggatggatcacttgagcccaggagttcaacaccagcctgagcaacatggtaaaaccccatctctaccaaaaatacaaaaattagctgggcttggtggctggcgcctgtaatcccagctactcaggagactgaggcagaaggatcgcttgaacctgggaggcagaggttgcagtgagccgagattgcgccactggactccagcctgcgtgacagagagcctgtctctaaattaattaattaattaatttaattcaattttaaaaagacgaaaagtgacggccaggtgcagtggctcacgcctataatctcagcactctgggaggccaagatggaggattgcttgaagccaggagtttgggaccagcctgggcaacatagggggatcccatctctacacacaaaaaaattttttaatgaaccaggcattgtggcatgcgcctatagtcccagccactcaagaggcacaggcgggaggatcacttgagcctgggaggttgtggttgcagtgagctatgattgtaccactgcactccagcctgggcaacagagcaagaccttgtctcaaaaataaacaaactaaaattaaaaaaagaagacgagagatagtgggtgtggtggctcacacctgcaatcccagcactttggaaggccgaggtgggcagatcatctgaggccaggagttcaagaccagcctggctaacatggtgaaatcctatctctaccaaaaatacaaaaattagccaggcgtggtggtgggcacctgtactggggaggtgcccacccagctactggggaggctgagtcaggagaatcgcttgaacctgggaggcggaggttgcggtcagctgagatggtgccactgcactccagcctgggcgaaagagcgactctgtctccaaaaaaaagagaagaggagaggacacagagacacacagagaagaaagccatgtggcggcagaggcagagatgggagtgatgcggacggacacaaactaagggatgccacgatgccaagcacagccaacagccaccagcagccaggagacaggcctgggacgggctctccctcacagcctccagagggaaccagccctgccaccaccttgaccctggacttctggcctgcagaactgtgagacaataaactctcattgttttaagctgcctggcatgtggcactttgtcagggcagcccaggaatctgaaacaggatcaaactctgcttcctgggccctgccagcatctctggctcggctttctgggctggatgcagcccacgacgcactggtgtctgagatggggctggagctggggctggggctgcattccctggagactcactgcaagttcctgcccaggaggctgagggcaccccatcctcagtgcccaatgctgtggccccaccaggcccagagcctggttggccattctcatgcccaccagcttctggctttgggatgtctcttgagcaaccagaatagcacccccaactctgctccccaaaacccatcactagcacggctcagcctcctgctatcccctgactgctggggaccctcgccttccctcctctcacctgcaggctgatccttcttttcactttctgtcaatgtcaccagggataaggtgggacaatggggggtgggggtggacagtgtgtgctggggggttcgggtgctgcagacctggaactcccttctgccaggatgttggcagccggttgtaagccttgcacgggacagaccacaaggggccatgccagtggctgtggaggacacagctggtgtgtggggaaggggagaagcctcagcacctggtgcacaaacacacacacagacacagacacacacacacacagagacaccgctgctcactccagggagtggcacagggcagtttcaaagaccactggggcatgaactatgggggcaaggcagagggttggagggccactgttgggctcctcattgggtctatgtctctgatcagcccaactttgggcagccctgggctgggggtgtcaggtgcccgggacacacacatgcacacacacacacatgcacacacaaagttcatgtgcaccccagaacatgtgagtaagatcagtaacgtgtattcttgtcaatatcctggagtgatcatttaccagagttttctgagatgttaaccacaggcacaagctgggtgtgtgggtatgaatggtccccaggaccaaactgcggtcccacaactgcatgtggttgtaggattatctcaaggtgcaggtgtttgacatccataaaccctcctccccaccactctgaaaggctgggctgtagacgaagacagggctcagaagccctggcctgtgggcccccaccacccggccactatgtctctgaggggccggagtctggccccatctgtggaacgggctggcgctctgggtgctgctttccaggttcccgctgctcacaggaggccgaggcccggctgtgaccctggagatgaggttttatcttacaacatcctctacagcaagtgggcacggggcctcgggctgaggaaggagccacagggcctgtcgcttgtagggtgccaggggtggggaacccaccggccagggcagcctcagaccttgatctcacaggcagcgaggggcctccgtgctggcagagatcagggctgagcggtgttggctgaaataaataccaccccggagaagatgggcaaatgcagacataagcaggtgccaggggtcacaaaggggaatcaaagtctgctggtactggtggcaggcagctggtagggccccccaaggcaggcaggttctgggcctgggggccctgggagtgggctggtcctctgggcacgaggacatcaggaactcacggtgaggaagcaccggggtcacccagccccggcagccggaagctgaaagtgcatttgctgagagccatctgcttccccgcagggccttgtgatgtgagcccgaggtccccggggggcgaaggcagagggtgcgagagctgggacagtcttagggcaatttggggtcctgggtgccccaaagggaggccggggctttgtgtttcagagaaacgcagcctgttccgttttgaagttgcccaccggctggatgttttgctaatttagtccacatcgtgtttgctcagaaagaggcttttggccacacgagtgctttctgggaatgtttcttctcccgggaacagaatgtcaggctgtgggagctgccgtggccccaggaaaatgatgcccagctccaaggctggggggttggggtgcttggagctccagctgtagctaggaaggtgggggatctcccaagggacctccagctgtcccccctgcaccacaccggtgactgctgagcccacacctgggtcccaagagtctcatcctagggacgggcagatctctgtcattctgttccttgggttcatttagaggcaggtgtcacctgggctgaggtctgcccacccaccatacagagtcacaggctgatagggacaggatgcagccagatggtgtcgtcctgctctcagcagggcagccgttaggaagagaagccgctctgactggccaggagaggagaaagattcctatggggccgccaggacttcgggatgggaccccacacccctttcctgaacccaactccacggggctcaggccagctgccacctcctcatttagatggcagaaccccaactggatgggggacacatggcccaggcctggcactgtacaactctgcctcctttccccttccagtggaccacagtgatgggctctgggtgtccatgtgcggtaagaggggagtagcttgtgtcagaccaccaaccaaatcgaaaagctacccatagcacactacccagcaatacaaaagaacaaactccaggccgggcacagtggctcacgcctgtaatcccaaagctttgggagactgagatgggaggatcacttgagcccaggaatttgaggctgcagtgcacaatgatcatgtctatgaacagccatggcactccagcttgggcaacatacagagaccccatctctacaacacacacacacacacacacacacacacacacacacacactagctgggcgtggtggtagtgtgtgcctgtggtcccagctactcaggaggctgaggcaagaggatcacttgagctcaggaggtcaaggctgcagtgagccatgaccacgccactacactccagcctgggcaacacagtgagacctcgtttgaaaaataaaagaataggcctggcatggtggctcatgcctgcaataccagcgctttgggaggccaacgcgggtggatcacctgaggtcaagagttcaagaccagcctggccaacatggtgaaaccccacctctactaaaaatacaaaaaaaattagccgggcatggtggcgggcccctgtaatcccagcttctggggaggctgagacaggagaatcgcttgaacccaggaggcggagattgcagtgagcccagattaaaaaaagaataaactatggatacacgaaacaacacaggtgaatgcaagggaatcatgctccaaagattatccgctctgattccatttacctggcattctcaaaataacaaaattacagacgggtagggggaaaatggcttagtggttgcaggtgttgaggggagagatgaagttatggaagagcagctggaaggatcctgtgcagatgggctgtttgttgactatggttgagattacacaaatctgcccatgaggaaaccgcacactgttaactacaggcaaaacttccctagtccaaaaatcctaaatctgaaatgttccaaaatccaagtctttttgagcagcgacttgacgtgctcaaaggcaatgctcattggggcatttcagatttttagattagggatgctgaaccttagctaactatataatgcaagcattctgaaatgtgaaaaaatctgaaatccgaaacactgctggtccccccagcatttcggataagggatccttgacccgtatgcgcgcgcgcgcgcgcacgcacacacacacacacacacacacacgcgcgcgtgcgcccgcgcacagctgttcgctggtgggtgttgcgtgggccagggtggagggaggatgaatgtcccactttgtccccaggaactctgagcctctgaccctgagtcactcccactgccagtggggggtcggggcggggcggaggagtcggggcaggtcgtcgggggaggttggtaggggagggaggtggggagatattgagcctatgtctcttatctctggggtgggcccagctgttacctgtcctccgcctccccttcaggctcagggtctgagtcctccacctcaaggccggctccattcagcttcacgtcctgctgtaaaggccccggggccacagaagccaggtcatccccgtaggtggaggacgacgaggccggcagccgctgctctggaaggaagggggcctcggtcgggagggcgtggcggggaggggacccaagggccgaggggaggagatccgtggcccagagcagcagcgatggtgtccccgaggctaggcggggggtagggtcctcaccgagggcgcagcagctgggaggcgcgggctccaggggcgcggcctggcggcaggcggcctcccgcaggcggcaggcgctggcgtagaccaccccgtcggagccgcacaccgggttcccctgggcgccgcagtcgtggtcgcagccgcatcgcgcgatcgccgccccctcctcaggggccacggcagggcccgactcgccggggaaccagcctgggggacgaggcaggctcgacagaccccccaccctgaaccttgcccgcgcccccacagaacctgggggtggggaagatgtccctgggtcccgggcccactaccccctcggtgggtcttggggcgcgacagttaatgggaggtcctgagccctggccttatggaatttcacgcaggtatttgcctaatacttacaaaaacagaaacagacttttaaaaagcggttgtaggagagaaaggagacagggcgtcctgtctgggccgccctgcaacaacagccccgtcccctgccgcgcctcctccgcactgaccacacccaccccaaccccacccccaccgcactgaccgctcctatcctcaaccccgccccctccgcggtgaccacacctaccctcaaccccgccccctccgtcctgaccactcttaaccccgccccctccgcactgaccacacccaccacaaatcccgcccctcagcgctgaccgcacccaccctcgaccccgccccccgcactgaccacacccaccgcaacctcatcccctcagcactaaccacatccactctcaaccccgtccccttcgcactgaccacacccaccccgttcggccccgccccccgcactgaacacacccgccctcaaccccgcaccctccgcactcacctccccctcgccgctcgaccccgccctcaccacactgaccaccctcaacccattgcgcccagtccccaccacagtgaccacaccctcactggctcggccctgcccccagtatactgaccattccccagccacttcccttccgcacttaccactcccccagccacgcccctccccgctgaccgctcctccagccccgcctcccccgtacaggcagagcgcccgcccacctctatgctgcgttctcctgactttacgttggcccctcctctgccaagcccccaggggagccctccctggcgtccgagggtgggagtcggggtgtggcaggccgcggtggggggcggcagtggctccgcgcactcacccgggccccgggcaggggcgcgctccacttcgttgcacgcgggtccggcgcacagttcccgggcgagtgggctgtgggtgctgacgttgtagaagcgagtggcctcgaaggctacgggacgagggtggcgggtgaccaagtgcaggcgcgacgggtcagggaccgggccgggccgggggtgcgggcgcgcgggcctaccgggttcgtagtagtcgtacacggagactggcagcgccgacgtcctgcccaccacgcactcccggagagcacggaaccgcacgcacgtcaggcaccggctggggatctgtggggcagcggcgggcgcaggctcgacccgggccaggaggcccggggcgctgagctcaggcccagaactggctgatttcagggatacccaggacgcgtgaaacacagaagaaacgtgatcccattttctttttttcttttacttttctttttttttttttttcctgagacagagtctcgcgctgttgcccaggctggagtgcagtggcgtgatctcggctcactgcaagctcggcctcctgggttcaaatgattctcctgcctcagcctcccaagtagctgggataacaggcgcccaccaccgcaccctgctaattttttgtatttttgatcaagacggagtttcaccatgttggccaggctggtctccaactcctgccctcaagtgatccgcctcggtcccattttttattctttgggtccttccatcccactgggaaaacgtctcaggtggcctctgaaacaccactcctttttgtgtgtgtgcacgcatggctgagcatgtgtgggtgggagtcagcacattcacgatactgtgcaatcatcacctctgtctagttacagaacggtttctttctcccccaaagaaaccccatcgccatcagcactcactccccactcccccagcccctggcaaccacaaatctttccaactctacggatttgcctgttctgggcatttcatgtcaatggaatcatgtactctgtggccttttgtgtctggcttctttcactcagcatcatgtttctgaggttcatccatgctgtagcatggatcaatgcttcgctccttcctacagatggataatatccactgcggcccctccctgctttttctaccaactgccatcagccgagggcacagagctgtcagcatggccaactctgcctggaatttattctcccagtgtcttatttttttttgtttttttttagacaaggtcttgcaggtcttgctctgtcacccaagctggagtgcagtggcacaatctcaggtcaccacaacctccgcctcccaggttcaaacgactctcctgcctcagcctcccaaatagctgggattacagtagcgtgccatcacacctggctaatttttgtgttttttgtagagacagggttctgtcatgttggccaggctggtcttgaactcctgatctcaggtgatccacctgcctcagtctcccaaagtgatgggattgcaggcgtaagccaaagggcctgggcacttttttatattttttgtaaagatggggtctcgccatgttgcccaggctggtctcgaacccctgagctcaagtgatcctcccacctcggcttcccaaagtgctgggattacaggcatgagccaccatgcccggccccagtgtcttttttatggtacaagatacttgcagggagccacaccaggcagtgaccggtgcaccctcaccaacatgcacaccagggaagcctcctccaccaaccccggctggtggtacctcatcaaagtagaagagcactcggcgtccagccacttcatacctcttcatccccatgtgcttgtcaaggagcagctgcagaggaagccagaagtcagggtcctcagactctctacttgcttcctctcccatcccctgggggcagtggtcagtgggatgcttggacttgcccacaagttaccatgggctggggtctgggtgctggtcagtgctccccaggccctgccagcctctcagcacccaggagaggacgctcaaggatggctatccccgctgggagcacctgcctcgcctccctatacactccctcaacccagccccaagcccaggtcaggcttctccgtggccaaagaggtgcccggctgagccctgccgcctgctggtgtctcagctgcactgttcaagttcccctcccagcctgggatttttttttttttttcagtttttgatttaaaaaaatccacacccactccaaggcctctgaattgaccacatcctcatcccctggtgctccgtgcagcctccttggaggggaggtgacaataggcccagctttcctgttccaccctccccacactgcagacctcctttggtccctgaaaccctcgcttcttggtcctctttctcccccagccagagccgggcagcaatccccacccccatgtccctcttccttcctgtacaaaatggggacatggcactggtctgtcttagggttgtgagggtgacagctggtctcggcagaatgtggattgagaataccccatggctccccacccagggccaaagcacatggaactttgctgaagttctaggtggcatttataatagtgtgacagtgggcccggtgctgtggctcacatctgtaatcccagcactttggaaggctgaggtgggctgatcacccgaggtcaggagtttgagaccagcctgaccaacatggagaaactccatctctactcaatacaaaaaaattagctgggcgtggtggtgcatgcctgtaatcccagctacttaggagactgaggcaggagaattgcttgaaccggggaggtggaggttgcagtgagctgagattgtgccattgcacagcctgggcaacaagagcaaaactccatctcaaataataataataataataatagtgacagtggccgcatgggagatccacctgttggagcagcccccacctcaccccatctactcctcagtagacagatgggccatttttgcccagaaaggggaggaaaaaaggggctgggcatagtggctcatgtctgtaaccccagcactttgtgaggctgaggcgggaggattgcttgagcccaggagtttgagaccagcctgggcaacatggcgaaaccctgtctctgccacaaatacaaaaattagcagggcatggtagtgcatgcttgtagtcccagctactcgggaggctgaggtgggaggattacttgagcctggaagttcaaggctccactgggaatttgagccaagatcagatcattacactgtagcctgggcaacagagcaagactatgtcaaaaaaaagaaagagaaacagggtaaaaggggagggggaggggaagggggagggggagagggagagggaagaaaagaatacccatagcattttacaaaggtctggactgccagccagcctgaccctgggtgcctaagccctacctattgttcagagatccctgcccaccgctgctcaccggcgctgcctcacctgctccaggctctcgatgtctgcccggaagcctgacagcaggggcacctccaggacagccatattggaagaccctgcatgcagccaccttccaacaacaggggagagagagaggccctagagctcaagcccagaggtggaattcaaggtcccctctccccctggagcccacacagctgatgtcccaggaagcctgccctggggcctggccggcaggccaacagcacacacatccttggctcggtcaactcagtcaacctattttacagcagggacactgagaccagagggaaagggccttgccaagggctctaggcctgaccaggtctcttgactaagcattgtgttctgtcctggacttcactctgtgtccccagcctgggaagcagctggcgaccccactctggacatggttgcacagagcagccacagctcaggtgcttcaacactgccaccctgcaggagactctgggaaatcaaccccctagctccggcctcagtttctccttctgtaacatggtggggcggggagggaggtaactgggcactctctggagcctgcaatatgccaggcgcttcctatagggcgttggggacaaggaagaggaagccaacattcagagtggagcttgcagctgcggggagtgcaccaagctggactctgatttccagaactttctgagatggggaacttggacacattcgggctgagagtcaaggtcagggcagccgttaccggggtagcggctctgatgggctgcgagtgtcatggcaaccactcacccaccaatcgtcgccatggtgacaagcatccatcaccatggcaacaaacatcttcttagggtgagggcccgctgcggccgggtcccaggctcactcttggaaaccaaggggtctggtgctggtgttatcgggcagggaccagtgtcccagccacacatcgctgtccccatccagcccacccgccccgaccatactggagtcttctgtgtccatttgcttttctttcattcatttcaaaaactggctgggcgaggtggctcacacctgtaatcccagcactttggggggctgaggcgggcagatcacgaggtcaggagttcgagaccagcctggccaacatggtgaaaccctgtatctactaaaaagacaaaaaagttagttgggcatgatggcgggcacctgtagtcccagctactcgggaggctgagacaggagaaccatttgaacccaggaggcagaggttgcagtgagccgagatcgcaccattgcactccagcctgggcgacagggtgagactctgtctcaaaaaaacaaaacaaaacaaaaaccaccactgagtgcctggagccggaagctcctcctggtcccaggaggccatcctctccgcacattgcaccctcctgggatgcccacgccagcagggcaggtggccttacctggtgcacacctccagcatcaccttgtattcctggtgatgctgatcggccgctgggtcatcatcgtcagctgggggccagtctcctcgggaaccctcagctgcggaggcaggcatggggggcgggcgtccctgggcctcaggctcctggaggcttacgagcagctggaaagctggcttggccaccgggtcaggcacattgtaggtgacatcaatctggggggtgttggaggatggaggcttagggacctgggccctccataacaggtgcagggtaggggaggagaagggcagtggggaggtgggaacagccagaattatgaggacaatgacatccatgacagttttagagactaccgttattcgttttagccttgaaatcactgaagcgggtgtaggtacaatcatcagaccagttttatggatctggggtgcagagctgtgctcagctatgtctgagtctaggggtctccctctcatccacagtgttatctgagctcccattttagagatcagaaaacggaggctagcgagagtcatcgcgggaaacttgccctctgactgccagtcagaacccgtgacatgcacctgccccagcctggtctggggctaaatccaggccacagcagggggaatgacctcgagcccttaggcaaatctgcttgagtcaatgggtcagagatccctggactgagggtcaaatggaccctctcaggtgtgggggtggcacacctgagaggacccatggccacctgccttgggcagtattagaaggctgaaaacctgtcctgcagtctggcatgctgctgagttcagaaccctctgggggtccctggggttccactgtgtgattggagggaatggggcacaggaggacaagcccaagatcacctcgtgctccccaaaacctcacctgcatcaggcagcagccgtcccccttggcactcacaaacagccccgtggggaggctggggatctggagacagaagtcaccgtgaggccctgctgacccctcctccaacaacccccaaaccctcatcccaggaacacgcaccgctgctgtctgcagaaccttctggttggtcctgtgcagctcgaaggtttcctggtagtccaggttggtggaggccagggagacagtgaggttgatgcctccagcataggacaagatggcatattcagccaaggcctgcagagccacgcaggtgtcctggggatggaggaggagacggccatcaaccctgagactgagttggccagtggtcccctgaaccccgtcttggaagcctagcctaaaacaggcaccaacggggctggaatagagactggacccagtgcagacacccatggcactgggggcctcaggacagccaggttggtgtgtccccagaggcagaggctgggctcccatgggggatccaggggcatctgtccctcacccccaacccctgccctctttggggctccataaggtgagaaggggccagactgcctggccacctcagagctcaaaacaaggactgcagggaccccacccacccagccctgagcccctccctctggccctgcccggctcgcctgagtggaggagaagcccccaagtgcatttcgctgctgggacagccacttcaccacaggcagggcggcagccacgtcacccagcagagtgtaggtcagaagggcgtaggctgtcatttccacctcggccgagaccactgcaatggaagaggcccactggggacttttgacacagggacatggacccagtgcatggaggtatggccaaggcaggcacccgggagctggggtggccagtacctgactgagagaccctgtcactgaagctcaagaatgtgcccttgtccacgtcccaggaatttgacaggctccagtgggtgaccccatctgcaaggaaaggagtggtcaagagctataacccacccagtgtgtagcctggcatcccatggagcgcatccaagcatggggtctaaagaaaaggtattgtgggaccccagtgggagaagagtatcaggggaagacagctggaacaggaagggccttggggctccatctcagatctgcaaacctatggcagccccagcccttcctgtgcccctggcagacatcgtgaatcaatggctacccaaccttacccctggcagacatcactaatcaaaggccaccttccccttcctggacacagacatcactagtcaatagcctccctcctgaccaggtactgatccagcccctgatgttcctacttagtgcccaagcagccacactcgacttgcaaaggctcaaagattctggccaggcacagtggctcacgcctgtaatccgagcactttgggaggctgaggtgagtggctcatttgaggtcaggagttcaagaccagcctggccaacatggtgaaatcccatctctactaaaaatacaaaaattagctgtgtgtggtggtgcacacctgtaatcctagctactcaggaggctgaggcaggagaattgcttgaacccagaaggcagaggttgcagtgagccaataccgagccactgcactccacactccagcctgggtgacagagtgagactgtctcaataaataaataaatacataaataaaaataataataataatttaaaaagaatggcaaggcacggtggctcatgcctgtaatcccagcactttgggaggctgaggcaggcggatcacctgaggtcaggagttcgagaccagcctgactaacatggagaaactcatctctactaaaaaatacaaaaaattagctgggcatggtggtgcatgcctgtaatcctggctacttgggaggctgagttaggagatcacgccattgcactccagcctgggcaacaagagcgaaactccgtttcaaaaaaaaaaaaaaaaaaaggaagaaaagaaaaaaaaaaaaaaaaagaaaaaggctccaaggattctgagctcgcatgaggtgtaaagactctcaaatccagagagaaaccagcccaccaccaccacctcccactccatccctggatcctctttaaacttttttctttcggaagcaatgaaaacaattcttcaggtggcatcttaatgcttaagcagagaaacctgtctgagccccagtgcagctgctgggggtaggggtggagtggggaggtctgggtgaagtaggaggagactaagtttgggggcattctgagaaagtcaaagctcagggattggagtcccagtggggtgatgattttgtaggtggggagactgacagctcaaaaaagctttccagggctcactcagcaagtggagggaagggtggaagcgagacccaaccctcccctgtctcccagcacccctgtcctgggatgatttccaggaagcctggccggaggcgggggatgcgttctctgctggggatccctctctgagaactccccttccagaggggttggcatcccagatttcacaggcaaggaaagtgatgcttggggctggtgtgacttggacaagccacttcctcaaataaagtcactagcagatgcgataatgaatgaatactataatcaacaaagcaattgacaagcaaaaggcatctcgtcagtttccctttctccttccttccttcctttcttcctctccctccctccctccctctctctcttctctccctccttccttccttctttccctttctttctttctttctttctttctttctttctttctttctttctttctttctttctttctttctttctttccttccttccttccttccttccttccttcttttctttctctttctttctaatggcattatctcagctcactgcaacctctgcctcctgggttcaagtgattcttgtgcctcagcctcccgagtagctggggttataggcacctgccaccacacccagctaatttttgtatttttaggagagacggggtttcaccatattggcccggctggtctcgaactcctggcctcaagtgatctgcccaaagtgctggaattacaggcgtgagccaccgcgcctggtcgactcatcagttttttgttttgttttgttttgtttttgagacggagtcttgctctgttacccaggctggagtgcaatggcgcgatctctgctcactgcaatctccgcctcccgggttcaagcgattctcctgcctcagcctcctgagtagctgggactacatgactcgtcagttgtgataaatatgttcatgagttgtttaccagactccacagtgggcttcccgacgctgtggcctctggggagggccagggacacctacctcgcatgatggccaggctacggagcttgcgcagtgcctcaggggctgccgggctgcggagcagggtcagcgcgtaggtagtcagggcacagctataagggtccatggccaggggcgcagcagactccaggaagtgcctcgctttgtcagtggagcctctctcctcctgcagggtggggtgggaaggtgaaacctgggaggctgctctgcccccatcccacccacccactggcttctgaggcatccccgaggagagctctgggtgactcctagccccttgctttgcatccttctgtggctctcactgcctgcagacccaattttcaaaccccatctcctttcttttctttcttgccttttttttttttttttttttttggtaataggctgggcgcaatgtaatcccagcactttgggaggccaaggtgggtggatcacctgaggtcaggagtttgagaccaccctggccaacatggtgaaaccccatctctactaaaaatacaaaaattagctgggcatggtggcacatgcctttaatcccagctacttgggaggctgaggtaggagaactgcttgaaccagggagttggaggttgcagtgagccaatatcgcgccactgcactccagcctggcaacagagtgaggctccgtctcaaaaaaaaaaaaaaaaatacagacagcatcttactctgttgcccaggctggagtgcagtggcacgatcatagctcactgaaaccttcacttcctgggcttaagcgatcctcccgccttgacctccccagtaactgggactacaggtgcacaccagcacgcccagctaacattttattttttgtagagatggagtctcactatgttgcccaggctggtcacacattcttgggctcaagcgagcctcccaccttggcttcccaaagagctgggattacaggagtgagccactgcccctggctcccattaccattcttgtaagttggcactcctttttccaaatgaggtctggccaggatgcccaagtgcatggcaaatgagcacagtgatactctaggggaagcaggcagagtcctggccaccctgtcccacccagccccatggccaggtctttgttaagacagctagctaaggccaggtacagtggctcatgcctgtaatcccagcactttgggaggccgaggtgggcagatcacttgaggtcaggagttcaagaccagcctggccaacatggtgaaattccatctctattaaaaatacaaaaattagccaggcgtggtggtgggcgcctataatccaagctattcagaaggctgaggcaggcacaagaatcccttgaacccgagaggcagaggttgcagtgagccgagattgcaccaccgcactccagcctgggcaacagagtgagacctcatcttaaaaaaaaaaaaaataatagaaataaaaagctggctcctaagacctccacagcccaggccctccccagcctccaggcctggtcacctccttagagaagcccaccagccctgctcatgccctccctagaatgtgatctgttggaagacagggaccaagtccagaatctactgatggttttggttcagagaagctgcccaataatattatgtggaagaaatgagtgaccagaagcattaacaaatttagcaatggaaccagagtcttctggtggcccaatagaggtatggagttgagctaactctgctttcggaactgtcctggtcatagaaagaatgtttccaaagctttccatccttagaccaggacaaacgtgggaactgtccctaaggtgtgacattgagatgccctttgggaggcatgtgccagggatgaacccggctgactagccagaccctaggactggccctcacaagtccattgcctgggggtgggggaaggttggacatccccatcccaggggcaggaacagtgacatgggagttaccccaggtcacgcgggccaggacgggtctcaaggacgctgcggagaccacaccaagcagggatggacccagcccggccccagctgtgcagatcctcccgtttacagacaagcggatgcaacggaactccaaggggtcaaggtcatttgctggttgccccccagctcatctgattccagcacaggtgtagcgggttgaacggtggcccaccaaaaagatatattccctgggacctgtaaatgctgacttatttaggaaatgggtctttgcagatgtaattaagagtcttgagatgagatcaccttggattaaggtggcctcaaatccaatgacaaatatctttaaaaaattttttttggctgggcacggtggctcacgcctgtaatcccagcactttgtgaggccgaggcaggtggatcatgagatcaggagatcgagaccatcctggctaacatggtgaaaccccatctctactaaaaatacaaaaaattagctgggcgtggtggcgagcgcctgtagatccagctactcaggaggctgaggtggaagaatggcatgaacctgggaggcggagcttgcaatgagccgagatcgcgccactgtactccagcctgggcaacagagcgagactccatctcaaaaagggaaaacaaacaaacaaacaaacccatctctactaaaaatacaaaaatagccaggcatggtggcccatgcctgtaatcccagctacttgggaggctgaggcaggagaatccttgaacccgggaggcagaggttgcagtgaactgagatcgctccattgcactccagcctaggcaataagagcgaaacttcgtctcaaaaaaaaaaaatttgtattagagacagaggtttcactgttactcagtgttactcaggctggagtgtagtggctattcataggcacaatcccactgctgatcggcacgggagtttttgtttgtttttaaaacaatctcatactgtcacccaggctggagtgcagtggtgcaatcttaactcactgcaacctccaccttccaggttcaagcgattctcctgcctcagcctcccgagtagctgggattacaggcacgtgccatggtgcctggctgatttttgtacttttagtagagataagcttttgccatattggccaggctggtctcggactcctggacccatgtgatccacctgcctcagcctcccaaagtgctgagattataggcatgagccactgtgcttggcgtccaatgacaagaacctttaactttttttttttttgagatggagtttcactcttgttgcccatgctggagtgcaatggcgtgatctcagctcaccgcaatctccgcctcccaggttcaagcgattcttctgcctcagcctcccgagtagctgggattacaggcatgcgccatcacacccagctaatttttgtattttcagtagagacggggattctccatgttggtcaggctggtctcgaactcccaacctcaggtgatctgcccgcctcagcctcccaaagagctgggattacaggcaggagccactgggcccgccttttttttttttttttaaattagtgacaggtctcactatgttgcccaggctggagtgcagtggctattcatacgcacgatctccctactgatcagcacaggagttttgacctgctccatttctgacctgggccagttcatccctctttggacaacttggtcatcctgctctcaagaggtcaccatattgatgctgaacttagtgcagacacttgattggtgcagtgcactacagcccagaactcctgggtcaagcaatcctcctgcctcagcctcccgagtagctgggactacaggaatgccctgctgcacatggcaacaagtgttgtttaagagacgagaaggggagaagacagaggagaaggtcacacgcagacaaaggcaggggctagagtgatgcagccacaagccaaagaatgcctggggtccctggaagctggaggcagcaaagaaagctcttcccttagagcctgcagagggagcaagggcctgccaatgccttgattttgcacttctggtctccaaagcaatgagaatgtatttctgttgttttaagccacccagtttgtggcaatttgttatggcagccacaggaaatgaagacagcaggttttgcctcctttggggaacgatctaagacaggggtccccaacctccgggtcacagactggtaccggttggtggcctgttaggaaggggctgcacagcaggaggtgagtgacaggtgagccagcaaagcttcatctgtatttacagccactccctatcgcttgtattaccacctgagctccacctcccatcggaccatcagcagcattagattctcgtgggagcatgaaccctattgtgaactgtgagcatgtgaggcatttgctggcagactccttttttttttgttctttttttttttttgagacagagtctggcttggttgcccaggctggagtgcagtggcacgagcttggctcactgcaacctctgcctcccaggttcaagcgattctcctgcctcagcctcccaagtagctgggacttcaggcatgcgccaccacacaagctaatttttgtatttttatttttattttattttattttttgagacagagtctggcactcttgcccgggctggagtgcagtggcaccatctcggctcacggcaagctctgcctcccaggttcacgccattctcctgcctcagcctcccgagtagctgggactacaggcgcctgccaccatgcccggctaattttttgtatttttagtagagacggggtttcaccagattagccaggatggtctcgatctcctgaccttgtgatccaccgcctcagcctcccaaagtgctgggattacaggcgtgagccaccacacccagacagtttttgtatttttagtagagacagggtttcatcatgttggccaggctggtctcaaactcctgacttcaagtgatctgcctgccttggcctcccaaagtgctgagattacaggtgtgaaccactgcacccagctggttgcacactccttatgagaatctaaagcctaatgatctgtcactgtctcccatcactcccagaaaggacagtctagttgcaggaaaacaagctcaggctcccactgattctatattatggtgagttgtataattatttcattatatattataatgtaataataatagaaataaagtgcacaataaatgtaatgctcttgaatctcccaaaactaccccctcttccccagtccatggaacaattgtcttccacaaaactggtcccttgtgccaaaaaggttggatactgctgatctaagagaccagaactcagaagaccagggagaaacaactgctgccctgcagggcaggccttcaggttcagaagagaaataggttggaaggctatggagaaggcagaaaaagattcttgggagaagtgaagtgacctcaagggataggaaggaggtagagggcctgttgagtgttcactgaagacataagggagggccaggcatggtggcttatgcctgtaatcccagtactttgggaggccaaggcaggaggatcacctgaggtcaggagtttgagaccagcctggccaacatggtggaacctggtctctactaaaaatacgaaaattagccggatgcagtggcacatgcctgtagtcccagctactcgggagtctgaagctgccatgccatggatcccaccctgcaaggggactcacagccctcaccccaagccaaagagaatcacttgaacccaggaggcggaggttgcagtgagctgaaaaaaaaaagtctcacctcaagatatgtgtcataaaagtgtacatatcttgttgtccatagtgatatggacaatgagaagattggaaagcttccagaggagagaacaaacgagatacaaaggatagtactcagaatgacatccgacttctcagtggaacacaggaaactagaagatgatagaacatcatcaattattctacaggaaaacaatttccaacctggaattctatacccagcccagctatcatacagggccagaataagaatatttgcagacatgcaacgtctcaaaaaatgtgcctcccaaaaccctttctcagtaaaggagggtagcaattgtgcagcatcctgggtgctgtccattccaactcgagtgggggccaagggctctggcagggaagtttccagaaaaatgcatttgggaggtgacatatttgaccacttccatgggagatgtggaggaggacttctgaggtatgagggggtgtcatggaatacgtgtgatcttcctcagaatccatatgttgaagctctaactcctaatatgatggtattaggagttggggacctttgagagataattaggtttagactgaggtcacgaggatggggcctccaaaataataggattagtgtccttatatgaagaggaagagcactagagctctctctccacatgcacacactagggaaacgccatgtgaacatacagtgagaaggtggcagtcaacaaatcaggaagagagccctcaccaagaaccaaatctgcctgtgccttggtcttggacttcccatcctctagaactgtgcaaaataaatgcctattgttgaagccacttactccatggtattttgtttctgcagcccaagctaagacagggcattaggaattcagcataagaatttggtcaggggagaaccaattcagcccataacacaaggcaaggggccctctggacattgtgcatggtgggggcggtcttaggtcacagcaaactgtagacccactagttgtctggattgtgagaccaagaatcctgagaagtgcccaaactcataatttatcatgagagattgtagaattgatgtaggtattagggagggcagattcttctcacccagggctgagatccatcgtggaagccttctctgcagagactgtgccatcccccaccccaggaaagcctcatagaagagactatggccctcaagtctcttgggccatctaagccccatccagtaccaactgtctctgaatatcctaacccctttccctgcaaaaacatgcatgagcccaacattttgtagggttccctgaagccaacccttgggtcactggccaggaacctgaactagcctgaaatgattctctgaaggaggtctaggggctgtggacagtcatgggaggctctgtactcagggcacctccccagcccccaacatgtgcccaatttccccctagtagcatgggaatctctctctcctctgctcagattacaagaaactggatgtaatgtgaccattgttgatgaaaagcatgaaaaagcctcgataatgagcagaaggagggcagggaggaagaaatcacccctggcataaaggagggaaccttccatttgctcctccagtgcccagccccgagtctccccaaaccccttctgtactcacctctgaggctgtgcctgtttccaggagagcaaccaccacgtaggctgtcagcgggacagtgccgtggatcccaccctgcaaggggactcacaggcctcaccctaagccaaaggagacagtccacttccccccacttcccccaggcagctccagggagtaggaacaggcaggtcagggctggggctctgggaggaggtgaggggcccgggaaggaggctcaaggggccactcacctggatgtccttgttcaggaccctgcccacggccaggaaggagccatcggcctgctgctgctggatgatccagctcttggcggcagccagctcccgggggtccacgaagataaagctgcgagcctgtgcgaaggacttcaggacaaaggctgtgagcctgaaagaggacagggtgtcagctgaggggttgcagaatggtcagcccccacatgctggctgagggattgcagcaagctcctggcaccacccccggcctccatttcctcatctataagatgggaggggtcccatctgtccccacagggctgtcagagtggaggagggggcacattgcccagcacccagtggggcttgaagacggagctctctccttcctacctggacctctaccctagtggcattcaggtctgctccttgctcggcactcaaggcccttctgtgagctggtctagccctgcctgtcctgccatgtgaggaagacccttctggttgccgacctcacagccatttcttgcttggtccttgccaaaaggcccctgatctcattcaggggccagcagccatgtgccctggagatctgtgcttctctgtggtcccagccagccagtcatgggcattccagtttctgagcctgggaatggctttggaatgggcatgtgatgcaatgctgggagcagctgcagccattttgccaccatgaggggtgcagccatgtgccaagggagggaatacccagggatggaaggaaaaaaacgagccccagtgcactatggggctgctgaattagccaaccatagcacctccccagccctgcagtgtgagctgatgttcagaattgctctccagcccgttttctgttgttttcagccaaaaacatctctgttatgtggcctgtccctcatccaccccatctcccttgccctgcttttgcaggtgccaccctgagtaagagctggcaaggccagggaatgaatgcatgaacaaatgaaggagagaagcacaggatggaagccaggaggccatgagggatgaaaaccaaaattgtcaggagaggaaacttcgcaaattcaggatcaatgaataagctgtcttcaaaatcaagtggctctaggctctttatatgaaccacaaaaatgggatgcattagcctgcccgcctgcccgcctgcctgccttccttccttccttccttccctccctccctcttcctttcttctttctctcttttctttctttttctttctttctttctctttctctctctccttcctttttctctctctcttttctttcctacttttctttcttgattttctttcttctctctctctccctccctcccttcctctctctctctctcttgctttcttgcttttcaagacagggtcttgctctgtcacccaggctggagtgcagtggtgcagtcctaactcactgtagcctacaactcccagctcaagcgattctcccacttcagcctcccaagtagctgggactacagggacgtgccacgacatccagcgaatttttaaattctttatagagatgaggtcttactatgttgcccaggcaggtctcgaactcctgggctccagtgatcctcccacaatggcctcccaaagtggtgggattataggcataagccaccatgctcactgcagcctctgcctctcagggtcaagcaattctcgtgcctcagcctcctgagtagctgggattacagcctcccgagtagctgggattgccaccatgcccagctaatatttttgtatttttagtagagacggggtttcaccatgctggccagactgatctcaaactcctgacctcaagtgatcctcccaccttggcttcccaaagtgctgggattcaggagttcaagaccagcctgactgacatggcgaaaccccatctccactaaaaataaaaaaaaattagccaggcgtggtggcgggcacctgtaatcccagctactcgggaggctgaggcaagagaattgcttgacctcaggaggcggaggttgcagtgacctgagatcgcaccactgcactctagcctgggtgtcaaaatgagaccctgtctcagacaaaaaagaataaataaataaatagataaaataaaataaaatatacccaaagctcatccaggccgttctccctctcaggtacctcaaatgcatcctcttctttctattcccatgttccctggattagccaggagaccccatggctcccaggctcatccccaccccattaccagctatgcacactgcaaccagggggaaactccatgcattttgggcacggcagggaaaggaggcaaggacagaaccaagccagctgtgtgctgggaattgtggaattcccatggtctagcatactgtgctctctactttcccactgtaaaacgcaaacaggataaatgttatcaagtgataaaaagaaatgagctctcagccggattcagtggcccatacttgtaatcctaacaccttgggaggctgaggcaggaggatcagttgaggccaggagtttgaaaccagcctgggcaacatagtgagaccctgttattcataaacaaacacacaaataaataaaaaatgagtgtgtgagtgaactctaatgtagattatgaaccttagttcataacgttttgatgccggtccatcaattgtaacaaatacagcacactaatacaagatgcctatcacatgggaagctgtgtatgggggtgtagaggtgtatgggaactctgttctatttactcaatttttctggaaacctagaactcttctaaaaagtaagatctatggccgggcgaggtggctcatgccagcagtgtttgggaggcagaggtggaggatcggctgaggccaggagcttgagaccagcctgggcaacacagcaacacctggtctctactgaaattcaaaaaaattagctgggcatggtagtgcatgcctgtggtcccagctgcttgcggggctgaggcggaaaaattgcttgagcccagaaaatcaaggctgctgtgagccctgattgtgccaccgcactctagcctgggaaacagagcgagatcttgtctcaaaaaaaattagttaaaataaataataaaaagtaaagtctaatgactatctgttatctgaaatgcttggaaccagaagtgtttcagattttgaatttggattttggaatatttgcatttacgggaatctcttggtatctgtaggggactggttccaggacccccaaggataccgaaatccactgatgctcaagtccccgatatacgagtgtgtagtagttgcatataaccgacacatatcctcccgtgaactttattttttatttttatttttgagacacagtctcaccctgttgcccaggctggagtgcagtggcacaatctcggctcactgcaatctctgcctccaggttcaagcaattctcctgcctcagcctcccgagtagctgggactacagacgcccaccaccatgcccagctaattttagtattttgagtagagacggggtttcgccatgttggccaggctggtctcgaactcctgacctcaggtgatccgcctaccttggcctcccaaagtgctgggattccaagcgtgagccacagcgcccggcccctcctgtgtactttaaagcatgtcttgattacttagaacacctaatacaatgcccacatgtcacttcatttgcatgaattcaatattgtactcagcatgcagcaaattcaacttttcgtttttggaactttgtggaatttttaaaactttttttttttttttttttttaagagatggagttttgctctgtcacccaggctggagtgcagtggcacaatcatagctcactgcagccttgaacttctgggctcaagggatcctcccacctcagcctccccagtagttgggactaaggcatgtaccaccacgcccagcttatttttaacatttttgccgagatgaggtcttgccatgtttctcaggctggtctccgactcctggcctcaaacaatcttcccgattcagcttccccaaagtgcagggatgacaggcacgtgccatcacacccagacttttttttttttttttttttctgaatagtttcgatctgtagttgattgaatcctgtggaactcacagatacggagggctacctgtatacttgggcatcccaaatgcaaaaaatctgaaatgctccaatgaacatttcccttgagcatgaggttggcactaaaagcatcttggagcccaggcacggtggctcacacctgtaatctcagcactttgggaggctgaggtgggcagatcacctgaggtcaggaattcgagaccagcctgggcaacatggtgaaatcctgtctctattaaaaatacaaaaattagccaggcatggtggcaggtgcctatagtcccagctactcaggaggctgaggcaggagaattgcttgaacccaggaggtggaggttgcagtgagccgagattataccactgaactccagcttgggtgatagggtgagaccccatctcaaaaaaagaaaaaaaaaaaggaatagaatagaatgaggcagaagtaacagcctgacttgtaagaccaagtaacaaaaggcgctatggcatccttcccgctttctctcttgaattgctcactgtgagaggaagccagccgccatgttgtaagaacactcaagtagtccctatggagaagtccatgtggtgagcaactgaggcctcctgccaacagccatgtgagggagccaatttggaaacaaatcttccagccccagtagagccttcagatgaagacagcaacagccaacaccttgactgcaacctcagcaaagatccccaggcagaaacacccagctaagctgctcctgaattcctgatccataagaattaatacataataaatagagataatacgtttgttgttttaaatggctacatttggggtcacttgttacacagcagtggataactattgcatctctcacagggtctttctcctgcactgggcagcgaggacctggaggtaggaaccatgtgttcctttttcccccaggatgaagaccagagcctagctcactcaatgaataaatgaatgaatgtgcgttgagtataagggaacccatctagaacagatcccaagttttcaggctccctggcaggatcttggagccttatggtaagtagttaggggaggtgctaacaggacggcactgcactgagtgtaccacatgcttatcccatggatccaggttcttagagggatgtgtggtaaggaaacaggctcagagaggttgatcatcgggtctaaggccacacagctcacatgagacagagctgaggtttgtccagcttcggggtgggtgctgctgccactgccctgcgctcactgcctccttgtcctacagggtccccaggaagacgtccatgtttggagaccaacaggaatgtttcaggaggtgagaggggacctggaagctgctgacttccatgcacacagtgaaatttgatttttcagccatgcgcggtggctcacgcctgtaatcccagcactttgggaggccgaggcgggcggatcacaaggtcagaagatcgagaccatcctggctaacacggtgaaaccccgtctctattaaaaatacaaaaaaagtagccaggcgtggtggcgggcgcctgtattcccagctactcgggaggctgaggcaggagaatggcgtgaacccagggggcggagcttgcagtgtgccgagatggcgccactgcactccagcctgggtgacagagcgagactccgtctcaaaaaaaacaaaaaggaaatttgatttttcttgctcatgctgagagtttaatccccggaagatgctgaggaggtgtgtgcacactgagtgtctaggccgggcacggtggctcacgcctgtaatcccagcactttaggaggccaaggcaggcggatcatctgaggtcaggagtttgagaccagcctggccaacatggtgaaaccccgtccctactaaaaatacaaaaattagctgggcatgatggtgcacacctgtaatcctagctactcaggaggctgaggcaggagaattgcttgaacctaggagatggaggttgcagtgacccaagattgcaccactgcactccagcctggggaacagagttagactctatctcaaaaaaaaaaaaaaaaaaaaaaaaggtccaatgcgtcacaacttgctaatcctggctggtggaggcctcctaggggctgctggggctcagccagcttttggagagtgactcagtggctttagctgtccctggggtgggcggggcctctgcttgctaagacgtgattggggccttgcgttatcagctgtcggcaaggcagggccctgggactagagctgggacagtgtggatgagctcctggggctgggggaggctgggtgagtcgccaaccctgggcccctctggagctaggtaagtgatgctgcccatggcaggaagtactcagccacatgtccccactccctgggatcctggcactgtgactgtgcagtggacactctgttggactaaagacagggcagtttccacgctcacagctgctgtcggcactaccagggtggcaatctccgagaaggagtccggcgatgggtacaggagttggaaagtgactcacagtctcaggtgaaccccatgatgatgccaagaactgcaatagcctgaggatatcaggaaaacaagacccaggtgtgcccggcctcccaggggccctccctgccctggtctcctccctgcagttaccacagaaacaagatcccaggctgctcctgcacacagcacaccccagcctcaaggtgctggtctggcctctgacccctctgccctgccatctcctcctgctccagtcaccgctattcctgagtcctgggagcttgaggaagcccagggcatccagggctcactcccaaggggccagagagcagggcatggagtcttgctcactgtggtaacagcagcagaaacaggaatggttacgatcaccagctctgcactggccccaagccccaacctccatctctggagctgggaccaccacagtctttacttcccagctgtgttccctgtcatccggggatcaggcgccaagtgatctggtcacactgcattggatgtgaggccatggcgtcgggcggggagcctcagaggcaatgcccagggcggtggggactcaccacatgctccccgatgcgtcccgctccccaaacgcgctgtaggagccatcctggcgcttgtaggtcagctggcgctggtagcctgtggggcaagcagagaggaccctgtcctgttgagtggcctggcccaggcccgcccccagggacctacaccactctgccgtcccctaccccggatctccgaagccacaccacatgtggggtccctggaattgcctcgaatcacatctggagtccttgaaactgccatacactcacatctggggtccctgaaactgccccataccacatgtggggttcttgaaactgctttataccacatttggagtccctaaaactgctccacaccacatctgggctcactgaaactgccctgtgtcacatctggggtccctgaaactgccccacaccacatctggggttcttgaaactgcctcatactacatctggagtccctggaaccgcagcgcaccacatctggggtccctgaaactgccccacatcacatctagggttcttgaaactgtctcattccacatctggagtccctggaactgctccacaccacacctggggtccctgaaactgccccacactacatctggggtccctgaaactgctccacaccacatctggggttcttgaaactgccccatacccacagcacatctggggtccccgaaactgctccacatcacatctagagttcttgaaactgcctcataccacatgtggagtccctggaactgctccacactacatctgaggtccctggaactgccccacaccacatctggggtctctgaaactgctccacacatctggggttcctgaaactgctccacaccacatctggggtccttgaaactaccctataccacattgggggtccctgaaactgctccacatcacatcggggatccctggaactacctcacaccacatctgaggtccttgaaactgccccacactacatctagggtggctgtaacctccaactcattcatcttgtttactgacattgccccttcgtgactactggtcacacactggccttcggtcactcccaggaggtcagcaaaaccaccatcttggggcagcgccctctgtcccccacagccctctgtccccaggcgtgggggctgctccaactgctggggcgagagcttgggaagctcagagaactggtggtgccggggacagggaacggagcagggaacgagggggtgaggtgagaggccggtgggccacagggcctccaaggctgggctgggagtgtggttttcctgcaagggcatagggagccatgggtggcgtgtgagtaggagaagagtgtgaggagacatatagagccagtggaccgtagggtctggacagaaagctggggacggggaaccctcccagtgtgcaatgatgagtttggacccagtggcggcgacagaggtggggagccttcctggggtgaaggcagagctactcagccagacacagcctgtgagggaaagaaggacgaatctgagggcaccactgtgtgtggtctgagcctcaggaaggacagggctgtgtccacagagacaggaccggtgaccaaagaaattctgtactgggtgggtcctcccaaattcacatccacttggaacccaaaaatgggaccttactggaaataaaagatctttacagatgtcattaaggttaggatctccagatgagagcatcttggatttatttaggatgggccctaaatccaatgacaggcatccttgtaagagaaaagagaggccgggcatcgtggcttgcacctggaatcccagcactttgggaggccaaggtgagaggatcacttgaggccgggagttcaagaccagcctggacaacatagcggaaccccatctttacaaagaattggctgggcatggtggtgcacacctgtagtcccagctactcaggaggctgaggtgggaggctcacttgagcccaggagttcaagtctgcagtgagctatgatcgcaccattgcactccggcctgggtgacagagcgagaccctagctcttacaaaaaaaaaaaagaaaagaaagggaattagtcacagaggtgacagccatgtgattgtgaaggcacagagcaggctgatcagtctataagccaaggaactcctggagccagcagacgccaggagagaggcctgggacagtctccctcagagccaccagtaggaaccagctctgcggacacctttatttttgacttttggcctccagaactatgaggagatgacacatttctgtcgttctaagccacccggtttgtggcattttgttgtggcagttttaggaaatgaacacaagtgggtttggggggaagatggcgggggttgatttggggtttgttgagtctgaactgcgagttggctggatgcacacagggtccggctgtcccctggaggtacaggctgttattcacgaggagggctcattcaactctgggtggtgtttaaggacctgagcctggatggatccaccagctggtgtccacccatctcccagaccctcacaagtgctaatctgagcccccaggacctggcctcagtggacttggccttcctagctgtccatgatcagccttcaagatgccagactttcagcctagagcaacccctgactgtttcttcttctttattcttttttattttttacagttggggtctcactctgtcaccctggctggagtgcagtggcacaatcacagttcactgcagcctccaactcctgggcccaagtgatcctcctgcctcagcctcctgagcagctgggactacaggggtgtgccaccatgtctggctaacattttttttattttttgtagagaccggggtcttgctttgttgcccaggcttgtctcaaactcctgggctcaagtaatcctcctgcctcggcctcccaaagtgttgggattacaggcatcagccactgtgcctggccttctcttttattttctaaatgttatttttaataatgctgttatattattattgttgtaaaaaaatccacactttaaaaagatgcttttcctctccctgtatctgaacagcaccatctcatcctaacagccacagacatcaggctcctgctgacagtgacaagatcagggccaccctgaatggcctcttttgcccacttcctcccctttgctgcacctggtgtgtgggccacctccagcgtggtcttctccactgaaggctgaacctgcctcccttgctcccacctcaacccaggcacttcttccccaataccttgtactaggtagtcggtggtctctctctccacctcagggctgagctgctgggttttctgaagatacttcaagacaaagacgttgggtgcaaagtggatcatgttctgctctccacagccaaacggcagccgcaggaggttgttgaggtggttcagggttggccccatgacgtcccctggtgggaaggagaagagagttgagttgggggctgtcccagttcagtagagaacagggacagctttacccagggatgggagacagtgagtgtcatgcagtcagccacccaactgccctttgggactggcaccctctgcctgctcagaccagctggtgtcctggctttggtgacagttttacacacctccttctgtgttctttagttttaactcaggctttctttctctagcttttcattctgttcaatgctttttccctccctggcttttaaaataggtgcattgaaagctatacattggcctctaagtacaactttggttgcatcctacaaatattggtatgtctatacaatcattctcattctattctagtctttctaaaatatttttttttttttgagatggagtctcactccatcacccaggctggagtatagtggcacaatctcggttcactgcaacctccgcttcccaggttcaagcaactctcctgcctcagcctcctgagtagctgggactacaggcgtgtgccaccacacccaactaattttttatttttatttttttagtagagacagggtttcatcatgttggccaggctggtcttgaactcctgacctcaggtgatccacctgcctctgcctcccaaagtgccggaattacaggcgtgatccactgcacctggtcctaaaatattctttctaaaatattcagattttctctttaaccaagagcacttcaatttttaaaaaaagtttctatatgtatggagttggaggtgcatttttcagttttctctctttaaaaaaaaattatggttctcccatccccttgacattccgtattcctcttcttggcttccttgtctcaaatatttctgatggacccccctgggacccccaatgtcccctgaacacaccttctttccttctttattttattttattttattttatttatttttagatggaatctcactctgtcaccaggctggactgcagtggcatgatcttggctcactgcaacctctgcctcccaggttcaagtgattctcctgcctcagcctcccaagtagctgggattacaggcttgtgccaccacgcccagctaatttttgtatttttagaagagacgagctttctccatgttggccaggatgatctccatctcttgatctcgttatccacctgcctcggcctcccaaagtgctgggattacaggcgtgagccaccacgcctggccccttctttctttctttagcctctctgcatgtctcactgaggctgccattgcccctacagctcttgttgcacaaatagcctggctactttctaggctctaggctccccagctttttctccatctgctgtgtcactgaaggcactggcacacagatcccagacgtcgcctcctctccattcctgcctctctgcttcttctcctatctcattcagttccatcttagtcactcagccccacatccactctgacttgctctcgtgcctcaggaattgtaaacttgaaattcctctgatctggccacaaccacctacctgcctgagtcccagggcctccaccctctgatgtcagagagagcctcgacaccctcatttgggtctgtccatctccttccggcctctcaccctctcctccctgactcaggcccatcccaaactctcaccacccttctgcccaactcctagccctggatcaatcacagcccctccagcacctgggctactagaggcatcctgatatggattggctgtgtccccaaccaaatcttgtcttgaattgtagctcccataattcccacatgttgtgggaaggactcggtgggagataactgaattatgggggcggcttccccatactgttctcgcagtagtgaataagtcttacgagatctgatggttttataaggcgaaaacccctttcacttggctctcattctctcattctccctgggaccatgtaagacgtacctgtcgccttccaccatgattgtgaggcctccccagccacgtgaaactgtgagtcaattaaacctctttttctttataaattacccagtcttgggtatgtctttatcagcagcatgaaaacagactaatacacatcccaaccctacagaccccctaaggctgcttccaatgtccctagtcagagcctctcacccctactcagcaactgctccggacgcctgccccatcaccaagaccccccaggcctccatcctgcaccgcatatctggctgacttattcaggtatttgtgttttcttggatcttgtccttggcccactgccctcacagggttcactgcaggttcttaggggtcaccctaccctgacctctgcataaggtttagacttggggggctctagatctgccatctcacctggactaggagtccctcaagggtggggttgggatcagctcttgggcttcctcaatgcccagcacatggatgggcatagagaaggcactggaagctgcttgtcaggtgagtgggtgtatgggtggacaccccaagacacaggtccccagcaaagcccagcttgagactaagcctggagtctcaacttcggctcttgccccctgacctctccaagccaggctgtgggacagacgcaccgatgatggaggcggtggctcgctcagacccagggatggcgccgtgtgggacccccagggtgaaggcctcgctgtagctctcgtccacctccatcttcctccagattcggaattcacccatggagccccagccggtggaaaagccaatgaactggacctctggtggcctcgggagggtccaggccacaatgacagactcattggatggctctggaccatggccaacctggaaaaagaaaccaaggctgctggacgctggcaggaagcaggcagtaggcactcaggtggcagtgacaccagctttgtggccagggtcagaggcctcagccatgctcacagtgcaaggaagggtcttcggggagtcagaggtgagagaaatcaggttaccccatccattaaacagccaacagaaacataaggcatggcatctacaggttccaaagtcattgggctccttggaacctctggacctttgcacatgctattgctctgcctagagaacctactctgcttccattttgcctagcgaactcctattcatacttcaaaacctactttggttatgttcttcctctaggaagcagtattagcttcctgtgttgggaagctgtgttagcttctatatcttctttttccttggcccagaaaacaccccccaacccccatttcacttgctcatgtccattcttcttttctcccctacctcctctctctgctccctgatccttgggtgcttcctctgccacagctcttgctacatgtttttttttttttttcggtaagcgactctagactaagaacaacttgaggtggtgctccatgtttcccttgctcctcctgaccctggatcaaagcctggcaccaaacaggaagcagctagtattggaggaacatgaggcttctgcacaagccccaggcagttctgctgtatacctggataaggccaccacgccagctgatccagaatgttctgaattcatcccaggagaggatcttggccgtgtgtgcactggccacgggctctcccatcttgctggtggagatccatgacctggtgttctgatgcccccccaggacgatctcgatcatgcctgctgtgtcctggggcccagaagacaaggccacacgggcatcattgtgagctcgcacagccacatcaaagcgggtgaggcgcagtggccgctgcacatactggaactcatacttgttgggggtggagatgtggactctctctggatggaggaaaggagatggggagttgagagggcacctggaggcatcccactttccctgatggtacctggaggtgagcaccaggaccacaaggagtgggtctcactgtgactcggcacacatggtggaatggtgttggcctaacaatggcattggcaatggcacacaaaagataaaatgggactgggcagagtagctgacacctgtaatcccagcactttaggaggctgaggcaggaagactacttgaggccaggagttcaagaccagcctgggcaacatagcaagactcttatctctacaaaaatgtttttaagttaacagtggcatgcatctgttgccccagctacttgggaggccaaggcaggaggatcgcttgagcccaggagttcaaggctgcagtgagccatgattgcaccattgcattccagcctgggtgactctctctctaaaaaacaagcaagattctctctctaaaaacaaaaagataagatgctcagggataaatctgaccaaagatgagcaaggtgttgaaaattgcaaaaggctgaagagagaaacaaaagaaaacccaaatcaacaaaagctagaccatgttcatggactatcatgaacattagagttcttccccagatggttctacagattcaaagcaatcccagtcaaaatcccaggaggctcttttggagaaattgctaactggattccaaaatttatacagacacgcaaaggacctaggagagctcaactttggtaaagaacccagcactctgggaggctgaggcaggtggaccacctgagatcaggagtttgagaccaacctgacccacatggtgaaactccgtctctactaaaaagacaaaaattagtcgggcgtgggggtaggtgcctgtaatcccggctactcaggaggctgaggtgggagaatcacttgaacccaggaggtggaggtttcagtgagctgagatcgtgccactgcactccagcatcggcgacaagagtgaaactccatctcaaaaaaaaaagaaaaaaaaaagaacacaactggaaaactcacactctctgacactgagacttaccataaagtgacaggaatcaccacaatgtgatatgagtatcaggaaacataaatgcaccaattattatgtggggagaggggctacttagaggcatctggtacttgcctccttgacgaacaaaaataacaagtagatcatcacactttgactagttcatctaagaacactggaattcaacagagaagtgacaagaaacacctaaagcgaagaaggaaatggaaataatacatggtgcttggcgggaatcagctgggggccgggagtagctccccagtgtgaggaaagggtgagtgaacccccgtggtccccattcccaccgtggactctagcagctctagccatgggagagcccctagatcctcgtgggccacagactagcctagggagatacccagagattgtgcaaagatactgttccagagagggggctaaggctgggtctcacacacccttgagccctaagcagctacagcagggcaccgtatcgagatcctagccactgccaggctgcattctgcctgggggccaaacagctcctgcatcttcacatctctggagccccacttacattccctgctcacagccaccaccaaggctggctgctgccaccaggaatgaagcccaagccattggcaatgacctcactgcccccagcagtgaagctgctgcacactttcacgtgccccgagggctaactccccaacctgcagcaactgccgctatgggatgctgcagccaggggccaaagcatgagcaaagctcatgctccccagccactgcatatggctgctgtcactggaagcaactgcaccctccccagtagcaaggctgaacccgagcattccaccagagacctaagaatcaccccacccctgcctaccatagccagcaactgcacacaccaccagggagcctgagataggtcggcccagcccagctctgtccccgcaagtgcctgagggtgccatccaagggccttgagactcccagcctagttcaccacagccggcacctgagcgctcctcctaggcatctgaggtcaggctcacccaacctaatgtgtgccactaacaccacagctggcacacacctgcctatgccacctgtgggcaaggaggttggcctacccagcctgtcacagccaccaccaacaccagagcagattgcttgggagccggagggtcatctcaccactgctactgccagtgcccatgccaagcccactgcccaggggctcaagaacctatccatgttcctggtccaccgctgccactactggcattcaagctagcttcctggaagtccaagagttggcccacctggacccactaacactggtaccagtgtagaatgccctggtgctcaaggaagtcatgctttgcccactgctgccaacactgggacctgaggacaggtccatctggcttccccatccccagcaaaacttcatcacagcctccactaataactgcaccctaagccactcaggaaatcacagacaccactgatgctgtttatagctaaagaaatcatatggagactacactactatacacattcagaatcaatctaaatgctgtacccaaccaacaccacagatagatcttcaggaaaaagtcttcctctatgaaagcaaattcaaaagattggaagaagcgactgttacaccaaacaccaaacgtatagacatcactgtaagaacacaagaaacgtgaaaaagcaaggaaacgtgacatcaccaaagaaacacaataattcttgagcaacagattccagtaaaaaaaaaaatgtatgtaattttggaaaaataattcaaaataatgacattagctgagtgtggtggctcacacctctaattccaatactttgagggtcaaggcaggtgaggccaggcattcaagaccagcctgggcaacatggcgaaaccccatctctaacaaaaatgcaaaaaattagccaggcgtggtggcatgtgcttgtagtcctagcttcttgggggtctgaggtgggaggatcacctgggcccaagaggtcaaggctgcagtgagccatgattgtgccactgcactccagcctgggcaacagagtgagatcctgtctcaagaaatagtaatggtaatgatataaaagaagctcagtgagacaaaagagaacacgtaagaaccatacaaagaagtcagaaaaacaattcaaaaaggaaccaaacaaattctgaaactgaagaattcattaaatgaaatacaaaataggaagcttcaataataaactagatgaagtagaagaaagaatttcagaacttgaagacagatcttttaaaataacccaatcagacaaaaataaagataaaagaaagaacaaagccaacatgacaaatgggacactataaagtaaccaaatactcaaaattttggtgtcccagaaagtgaagaaaaaacaaaaggggtagaaaacctatttaacaaaataatagctgaaaacttcccaagtctaataagagatttaggcatccagatacaggaagctcagacacctccaaatgggtataattcaaaaaggtcttctccacagcacattatggtcaaactgtcaaaagacaaaaatatcatttttttcttttactttttcttttcccttttttccagtgtggttggacaaaaagatagttctaaagacagcaagagagggcttggcacagtggctcacacctgtaatcccagcattttgggaggctgaggcaggaagatcacttgaggccaggagttcaagaccagcctgggcaacataatcttttcaataaatggtgctggcacagttggctatccaaatgcagaaacataaactttgatgcatatcttgcatggtaatccaaaattaactcaaaatgaatcatggccactttgtagtgtaaaacttaaaactacaaaattttgagaaaaaaaaaacagggtttagcaaagatttcttaaatatagcaaatgcattaatgaataaaaagaaaaaataataaattgcacttaattaatataaaaaaacttctgcttctcaaaagatataattaagagaatgaatgaaaaggtaagccacggtctgggagaaatatttttgcaaagcatttatctgataaagaacttgtatccagaatatattttcaaatctcaaaatgcaataaaaaaagtacaactcaattttgaacaggttaaaagattggaacagacgtttttccacaaaaaaaaagacatactcatagcaaacaggcaaatgaaaatatgcttaagatcatcagtcatgatggaaatgcaagctgaaaccacagggagatgtcactgggtatctattagaatggctaaaagtaaaaagactaacaatactaaatgttggtgaggatggggaggaaatggaactctcacatactgcaggtgggaatacaaaatggcctgagcactttagaaaacaggttggcagtttcttaaaaagttaaacatacacgaaccatatgattctgttctttcattcctagctattgacccaagagaaaggaaagcatgttacccagaaaagacacaaatgataatagtagctttatttgagatactcccaaactggaaacagcttgaaagttcatcaacagatgaatggatgaatacattgtgatatatccattcaatggaatcctactcagccttaaaatgattgaattattgacacatgcaccatggatgaatctcaaaattattatcctgaaagaaaccagacaaaaagaatacatacgacatgattccatttatataacattctggaaaatacaaactaatctacagagacagaaagcagctcagtggtccctagtgatggagtaaacaggagtgagagattacaaacgggcatgactcttgggaggtgaaggaaatgtttgttatcttagttgtgacaatggtttcacagacgtacatatatgttaaaactcaccaaattgcacatttaaaatgtgtgtaatttattgtatgtcaattatgcctcaataaacatatttaaaatattattgcctttactattcatataaatatgttcataaaagtgttaattacaatattaaaaagtagaagtactataagaaagtccagtaatatgttccaaaatgttccataacatgttctaaaatgctccataatggttaaattatggaacagttattatgaaacattctgaggctgtcttgaaatgctgttcataaagactttatactaaccagaaaaagtgctcagaatgtgttaagtgaaaaatgcagcatatataattacatagtgcgtgaagtaacaactatgttaaaacaaacaataatcaaccctatgaaagcaaatacaacaaaatgtcaaaggaagtcttctttgggtgtgaaccagaggagatgcttttccttctaccttcccaaatttctgcaatacacatgtattgcttttcattttacaatgttttaattgtggtaaaatatatataacataaaatgtaccatcttaaccatttttcagggtagagttcaatggcattaagtacactcaatgttgtgcaaccaccaccaccatcacccatttcaagaactcttttcatcctgtaaaactgtaactctgcacccattattacattaagcactcgctccctattccctcctcccccagcctcttgtaaacaccattctactttctttctctatgattttgactactctaagtgcctcatataagtggaatcatatggtatttgtacatatgtattgcttttaaaaatgtttttaacttaaagttttgctaagataatcacatgcaattgttataaataattcagagagctctctgtacccgtttccccctctccccatggtaacatcttgcaaaatcacaatcaggaatattgacattgataaaatccatcaatcttattcagctttctccaattctatttgtactttttatgtgagtgccatgtaattttatcacatatgtaggtacacgaatccactaccacagtcaaggtactaaacattcccaacaccacagagattctcaccgttgcccatttataaccatatccatcccctacttccttctccctctccctaacccctggcaaccactaatatgacctccatttataaaattttgtcatttcaaaaatataaatggaataattcatgtatcttttgggattttcttcccactcaattcccttcattcaagattcatccaagttgttttatgtatcaatagtttgtcctttttattaatgagtagtattccaaggcttgaatgcacagtttgttaagtcattcacctgctgaaggacatccgggctgtttccagtttggggctactacaaataaagctaatatgaacatctatgtacaagtttttgtgtgaacataagtctttgtttctctgagatcaatactcaggagtacaactactgagtggtggggtagttgcatgctcagttttttaagaaaccaccaaactgtttttaaaaactaccaaaggtggctgtaccattttacatttccaccagcaaagtttgagtggtccactttctccacatctttgccatcatttagtgttcactatttttttttttttttgagatagcaactcactctgtcgcctaggctggagtgtggtggtgccatcacagttcactgccacctcagcctctcagggtcaagcaatcctccctcctcagcctcccaagtagctaggactacaggcacaagccaccatgcccagctaatattttgtatttttgtagagacagggtctcatcatgttggccaggctggtcttgaactcctggactcaagttctccacccaccttggcctctcaaagtgctgggattataggcatgagccactgcgcccagctctatttttaatcttagccattcttataggtggtgtgtaggggtatgtcattatgctgtaatttgcatttccctaatgataaatgatgttgagcatctttttatgtgcaatttgccatctgtatgtctcctctggtgaaatgtctggttatttcttttgcccacttttttgtttgtttgtttgttgttgttgttgagatggagtctcattctgtcacccaggctggagtgcagtggcgcaatcttggctcactgcaacctctgcctcccaggttcaagctattctcatgcctcagcctcctaagtagctgggaccacaggcacctgccaccatgcctggctaatttttttttgtattttttgtagagatggagtttcaccgtgctggtcaggctggtctcgaactcttgacctcaagtgatccacctgcctcggcctcccaaagtgctgggattacaggtgtgagccaccacagtcggccttgcccacttttaattagatggtttgttttattcactactgaattggagacttcattatatattctaaaaaccagtaatttgataaggtttgcaaatgtattttctcccagtctgtagactgtagttcctcccttaacagggtttattgtggagaaaaaaacttttaaagtttgaagaggtttatttattaatgtttccttttatagattgtacttttcaagtctaaaaactatatgcttggctctaggtggcagatctttttttccctcttttctttctccttccttccttccttccttttttccttcctttccttcccttcctctttcctttctcccttccttccttccctcctgccttccttccttccttccttccttcctccttccttcctttcttccttccctccctccatccctccctcccttccttacttcatttttttgagacagggtttctctctgtcaaccaggctggagtgtagtggtacaataaaggctcactacaacctccacctcctgggctcaagcaatcctcccacctccacctcccaagtagctgggactacaggcgtgcaccaccacgtctggctaagtttttgtttgcttgtttgcttgtttgtttaattttttgtagagatgggatttcaccatgttgcccaggctgtcctgtgtttttttctaaaagcactatggttttacgtttaagtccatgatccatttagggttcattctcgtgtaaggtgtgatctttaggtccagcctcatgtgttgttgttgttgttttgagacggagtctcactctgtcacccaggctggagtgctgtgatgcaaacttggctcactgcaacctccacctcttgggttcaagagattctgctgtctcaacctcccaagtagctgggattacaggcacacacaaccacacctggctaacttcatacttttttttttttttttttttgagttggagtctcgctctgtcacccaggctggagtgcaatggcgtgatctcggctcactgcaacctccgcctccccggttcaagtgattctcctgcctcagcctcctgagcagctgggattacaggtgcgtgccaccacgaccagctaattttttgtatttttagtagagatggggtttcaccatgttggtcaggcttggtctcaaactcctaaccttgtgatccacccgcctcggcctcccagagtgctgggattataggcgtgagcctaccgcgcccggccaactttgtacttttagtattgataagtttcaccacgttggccaggctggtctcaaactcctgacttcaaatgatccaccttcctcaggatcccaaagtgctgggattacaggtgtgagccaccgtgcccgggcagcctaaccttcttgcttggtgcctgcagtgcacattcctgtgtattcattccctgcgtattccctgtgtattcattccctgagtattcattccctgtgtattcattcattcatgccccaccctcactggctctgcctgtccccagctgggacatcgttcttcctaaaccacagtgcccccttcccaggggaagggcaggtgctcactttgcagcgggacagcccccacagtgtgggaaagggggaaggccaaagtcctgacccagccaggtggccacaccttagcagaatgggcacgggggactcaccactgggacagaagaatgcgctgtaggtgtacgcccgggggactccttccgcctgaaacaaagaaacaaggagaactgagtgctggggcggtgagggggatggtcagctcagcggagcagctggctctcccacagcaatgacttcaagtccagaccacataattgtgcttccaggttttacgtggtatcagcacggtcacaccaagatcacaggtgcgtggagcaggacagggccacccacttcccaggctccaatggggaaactgaggctgctcccccttgctggccaaaaggaactcaccaactgcttctaaacttgtcatggggcccacatccctaccctaccctcccagccaccctcttcctcccatctccctctgggcagaggacatcatgaggacaaataagccaggttctgaggcctcatttgacatccgtgagcactgtgagaggggctcctgcatctgccaaggacgagtctccgtcccactgtctgtctaccacatctcttgtctcctgtctcttccatctgggttctcatttctgcttcttctatggatgaccccaaataccagaaggcagctgtctcagtctcttaaaaagggatgcccagaatttaaccccctataccttgcggagcttggtctgaccaacacggcccctgtgggggcccttggatcagacctcaaagggttaacatggggcagctgcaaccagaaggcctggcagcccctttccccattaggatggtcaattttatttatttatttatttatttatttatttatttatttatctatctatctatgtatctatctatctatctatggacagagtctcactctgtcgcccaggctggagtgcagtggtgtgagtgatctcagctcattgaaacttctgcctcctgggtttaagcaagtctcatgcctcagcctcccaagtagctgggactacaggcacatgccaccacgccaagctaattttttatatttttagtggagatgggattttgccatgttggccaggctagtctcaagctcctgacctcaagcgatccgcctgcctcggcctccgaaagtgctgggattacaggcatgagacaccgtgcccagcctaggatggtcaattttaggtgtcaactggactgggctccaggatgcccaggtagctggttaaacactctatctgggcgcgtccaggaagtgcttctgcaagagatcagcattggtgttggaggactgagtagggcacacggccctctccaatgtgagtgggcaccatccaagctgttaaacgtctcctgatagaacaagacagaggaagattggttccactctctgcccaactgcttgagctgggacattgatcttctcctgctcctggttcccaggccttcagacctgggctggaatctacaccattggttctccagctctcaggccttccagctacaccactggctttactgggtctttagcttttttgttgttgttgttgttgttttgggttttttttgtttttgtttttgtttttttttagatggagtctcactctgttgcccaggctggagtgcaatggcgcgatctcggttcactacaacctccgcctcctgagttcaaatgatcttcctgcctcagcctcctgagtagcagggattacaggcaccaccaccaggcccagctaatttttgtacttttagtagagacagggtttcactatgttggccaggctagtctcgaactcctgacctcaggtgatctgcctgcctcagcctcccaaagtgctaggattacaggcgtgagccaccacgcccggcctcctgggtctctatcttgcagagggcagcttgtaaacttctcggcttccataagcgcatgagccagtaccttatgataaacctatcctacagatgtatgtgtgggagtgtgtttatataacaaatctcattctatgtatgtagggggtgcggatttctgtttctctggtgaatcctaatacaaccattcctgctgactggcttagggccactcactcaacctctctgggcccccatttcttcatctctaagatgggggttaaagacccccaacttcaccttgtgacggggttatcatgcttcagaaagggtctggagtcttctcagtgctactgacagtcagttcttgttatattttctcatccttacctactttcattacaaagctctccttgaaattgtcatgtgtctatactgatgagtccaggagatgcttgtccccactcacatccacttcctagtaaagttcccagggttggtgctgagaggctgaggacaccatctcaggctacatcgagccgtccacctgccaggatttcatctcacacctgctaggcccgatgtggcacccacgggtcatttgctaagctagggggcaccagggaaggccccagaagcattgcttaggcctcagtaaccccccatctacctgcctggccccttgtcgggaaagggatttggagcaatgggcagggctaggccattgtaacccacggtagttttttgttttttgtttttgagatggaatctcgctctgtcgcccaggctggagtccagtggcgcagtctcagctcactgcaacctctgcctcccaggttcaagcaattctcctgtctcagcctcccaagtagctgggattacaggtgcctgccaccacacctggctaattttttgtatagtttagtagagacggggtttcaccatgttggccaggctggtctcgaactcctggcctcaggtgatccacctgccttggcctcccaaagtgctgggattacaggcatgagccactgtgcctggcctcatggtagctttttaacagctacataatcctaaaaattgtgcataacctaaatgtccaccataggtgaacagataaagaaaatgtggttcatccatccagtggaatatgattgagccatagaagcaagcacgtatctatgctgcaccgtggatgaaccctgaacacattgtgctgagtgagagaagccagactcaaaaggccacatgttgtatgattccattgatacaaaatgtcccgtgggcaaatccatagagacagaaccagatccattctgttggtggtgagtgatatggtttggatttgtgttcccacccaaatctcatgttgaattgtaatcctcaatgttggaagaggggcctggtggaaggtgattggatcatgggggcggatttcccccttgctgttctcgtgataatgggtgagttctcatgagatctggttgtttgaaactgtgaagcggctgggcacggtggctcacgcctgtaatcccagcactttgggaggccgaggtgagtggatcacgaggtcaagagattgagaccagcctggccaacatggtgaaaccctgcctctactaaaaatataaaaattatccgggcatggtggcaggtgcctgcaatcccagctattcgggaggctgaggcaggagactcgcttgaacaaggaggctggaggttgcaatgagctgagatcatgccattgcactccagcgtggcgacagagcgagactccatctcaaaacaacaacaagaacaacaacaacaaaactgtgaagcacctccccttccctcctcctcctgctccagccatgtaagacacgcctgcttctccttcacctcctgccatgattgtaagtttcctgaggcctccccagccatgcttcctgtacagcctacagagctgtgagccaattaaacctcttttctttactaattatccagtcatggtcgggcacagtggctcatgcctgtaatcccagcactttgggagaccgaggcgggcgggtcacctgaggtcaggcgttcaagaccaacctggccaacatggtgaaaccccgtctctactaaaaatacaaaaattagccaggtgtggtggtgcatgcctgtagtccccgctactcaggaggctgagaaagaagaatcactggaacctgggaggtggaggttgcagtgagctgagattgcaccactgcactccagcctgggcgacagagtgagactccatccccaaaactagtaataatataaataaactaataaataaataacccagtctcaggtatttctttatagcaatgtaagaacgaactaatacaacaaggatgcactgtgcctctggctgaccattggctggggccctgggcacaaatccaggggcccctcatggtttctgggtcccaagaaacctctgctgactcagctcacagaggaccccacagctggcttcctcaatgatgcccatctcttccactctgcccctctgccgtggcttgggtttgctccttgagtgttagcccatctcgggctgcacttgtccatcctggttccaacctcctttgtctctgtgctctttctggcttggggccagatctcagaacacggagcctgcatgatgcacgaatagtagctccggctgggcatttctaaagccttgtagtacagatctgtgcttcactcctttcggcctctctggatttgcctgttctgggcatttcatataaattgaatcatacaccatgtggccttttgtgtttgacttttttcttttttcttttttcttttttttttttttgagacagggtctggctctctcacccaggctagagtgcagtgttgcaagagtccctctgttgcttactgtaactctcacctcctggactcaagcaatcctccctcctcagcctcctgaggagctgggactacaggtgtgtgccaccacgcccagctaatttttgtatttttagtagggacagggttttgccatgttgcccaggctggtctcaaactcttgacttcaggtggtctgcccaccttggcctcccaaagtgctgggactataggcgtgagccaccgtgcccggcctgtgtctgtcttctttcactcggtatcacgttttctaggtttatccacgttgtagcatggatcagtgctttatttatttatttatttattcattcattcattcatttagacagggtctggctctgttttccaggctgagtatagtggcataatcatagctcactgcagcctccaacttctggcctcaagccatcctcctgcctcagcctcccaaagcacaaggattacaggtgtgagccaccacacccagcccttcactccatttcacagctgaataatattccattgcattgaggaattgcatttcattgacccacattcatttctctaattcatcagctgatggacatttcctaaaatagaaagtgtatccctgactttggtttgggattccccagttgactgttataaatgcctgtgtgacaacagcacgtgggtctttagtagacaggccagataccatgagaggctttccaccaacactctcatttaaccatccaacgcttccatccgaatctggggctctcactccagagcccactccctggctggccagccctcctatcactccagtgaggcccgaattatttctgcctcctctttgctccttggaatttcactgaagtgaaattcacgtggagatgattgaacactctcagcctcccagcagatatagaggatcttagtccccttgcaggccagcaggggagcaaggcagagcggtgtccgtactccctgcacctgccaagccatccccaccctggtacagtgcccatgatgggccgtgcacagatgatgattccccaccggcccatgcatcgtattcagcttcctgctcctaagtccatctcagctggtggcgcccacagtcctccggtgggaagaggtaggaggagcattttgctgctttatcaagccacacatcctggtgcctcttgtttcataaattgcttttctaattgtagcttcatcttttgcatcaacatttcaagtcttctgatgcctgtatctttccccagagctgcctccaggaagccggacaagtggatactgcaggtgcagagacagttctgcggcatggatgggaggaaaggctccagggaaggagaccctcaagagtccccctgtgtgcattgagaaatcccttctgtaaggggaggaggcaagaacgccaggcctccaggttctgcagctcggaggggctcgctgcctccttcttgggccttaggagggcaggctgtggcccagggaggatgccctggctgggcaaagggtgactgggggtctctgcatttccccatctggaccctcccaccctgctggctcacagagatctcggtccccacctgacagcactcttgtccccaaggaatccatcacatcacatcaacgacactacagcggtgacctgtccactgtcaccgctccggagttctgcccagtgggcacatgactcctggtgctgacagaagccacttgtgttcagggccagcaggatcccagcagggagggagagcagctgtttgcagctgggcctctggggaatgtgagtcccttcgggctgctgttaggggctgttggtgcggcaccaaatggagcctcagtagggctctgatgtgtccaagcagccaagaaaagatgaggcatggtggctgctgcatgctcagccctgagacatctgtgtgtcatctctggcttcccaccccatcttatgaaggtgagcccctcgtcttacagagcggggctggaaagccaggatgcttcccgagatcatgggtaagtggccaatcctggattcatagctgggggtctgcaagatcctggcgcctgcctctgccccctgcagctctgtgtccttcctacacaggccatccaatgacaatgccccaaatgctgagtcatggtccccataaatgcctatgacaagcacgagatgagggacatggtcttcctaaatagttcacccaggggtcagggagcacttgctgcagcccctgaagagtcccaagctgctttaccgaagcccactctgcgctttagggagggaacggactaccatgatcctctaacaaggaagtacccgaaagtccaggcacctgagctctcaagcacaacccgtgaaggctgcccaggccctggctcagcctcagaccacacactccagctgggcccagcttcatggctgaaggaatgaggccctggctaagcaccagagatgaggacacggccttacctcaaccatcacactgcgcctgacgtgatccaccccgatggggaccctcctgtcggcgtgattctcctcagggtgtttgctggacctcccatcccggcagcaatttgtgtctccgtaagcaagggctttggctgcagaaatttgatgtcttggtctcagaacaggtctccacccaagatgggggctgtcccatccctatccttatcccagatgtgtgtgcatgcatgcatgtgtgtgtgtgtgcatgtgtgtgtgtatatgcagatgtgtgcatgcatgcaagtgtgtatgtctgcacatgtatgcatgtgtttgaatgtacaggctcatgtgtgcatatgcatgcacttgtacatgtgtttgtgtgtacgagtttgtgcatatgcacgtgtgtgcatttgtgtgcacgagtttgtgtgtgcatttgtgtgtgtacaaatatgtgtgtgcatatgcatgtgtgtatctgtacgtgtgtttgtgtgtatatgcatgtgtgtgcatttttccatgtttgtgtgtacaagtttgtatgtgtatatgcatgtgtgtatgtgtgtgcatgtgtttgtacaggttcgtgtgtgcaatgcatatctgcacatgtgggcatgtgtgtgtgtatgatttgtgtgtgtgtgtgcatgtctgcatgtgcaggcatgtgtctgtgtgtgtggatttgtgtgtgatgcatgtctacacatgtgggcatgtgtgtgtgtggattcgtgtgtgtgatgcatgtctacacatgcaggcatgtgcgtgtgtggatttgtttgtatatgtatgtatgtctacacgtgggggtgtgtgtgtgtggatttgtgtgtgtgtatatgcatgtctacacatgtgggcatgtgtgtggatttgtgtgtgtgaatgcatgtctacacatgtgggcatgtgtgtggatctgtgtgtatgcatgtctacacatgtgggcatgtgtgtgtggatttgtgtgtgtgtgtgaatgcatgtctacacatgtgggcgtgtgtgtggatttgtgtgtgtgtatatgcacgtctacacgtgggcgtgtgtgtgtggatttgtggtgtgtgtatgcatgtctacacatggggacatgtgtgtggatttgtgtgtgtgtatatgcatgtctacacgtgggtgtgtgtgtggatttgtggtgtgtgtatgcatgtctacacatgtggacgtgtgtgtgtggatttgtgtgtgtgcatgtctacacatgtgggcgtgtgtgtggatttgtgtgtgtatgcatgtctgcatgtgtgtgtgctacactgggttggcaccttaagagcccagctcccccaacaggtgagaccccagggcttgcctccccactcctcctgggcccattccttctgtcctgcttgccccagttgctgtcccattttccttgggacagtcctgaccttacctgctgccccatccacccctcatccccaactcgggtcaatgccaggacacttttgtggcctggagaggggggacaccccaagaactgtggggtcctcacccgtgatgttgttgagtcccaggtcgctgaaggacagaacgacccagatgggctcagcctccccgggggccacacacatcttcttggtcacatggcgtttgccaggatgcccaacaaactggatgcccttgggaaccgagagcttcatgtacacctgcagagggtggcattggctcatggcgcctggaatccagaccccctcccagtgcctggaggcccaacacacatcccaccactcactgcacacaccagacttgtcagcctcccaaagagccatgctccccccgggaaggtcccctttccatttccgatcagaacaaactaccctctgctgtctggtgccccacttggccttctcatgcccatctgtcttgctgtgagacctctcctccccacagccctccgtatcctcacaggtccagatctcccatggactgaagctgccagttccagccagggctgcctctcctgcatgtccatccactccgggactccagatggatgtaacctctcccacagcaggtccacagagtgcctctcctgaccctctttccaaccgtgcagctccatgatgtcagagtacagctctgtgtgtgcacgtgtgtgtttattcatgtgcatgtgtgtgctgtgaatgcatgtgtcccctgggtgcacacttgtgtgcatggatgcaagcacagactgcatacacatgtgcatgcatgcatgtacacacatgtgcatctaccgggtgaaggcatgtggatatgcattcgtgtgtgtgtgtatgggcatgctagtttctgcatgcatgtgtgtgcctatatgggtacagaggtgctatggatgcacccatgggactccatgtgcatgtctgtgcatggatgtgcaagtatggcatgtgtatacatgtatcatgcatgtacatgtgcatatgtataccatgatgacttgtgtgggtgcatcatgtgcatgctcacacatactggtctctgtgtgcatgtgtgtgcattttgcagggtgtgtgcatgtgcattgtgggtgcatatgcaagcacgtttgcaacccctccatctaagaggaaatctttgctccacatccatttgtccaaccagcatatatggagcacctactgggtgccccgctaggaattaaagaaatggctgatcaagacatgagtgattgctgagcctcagaatgttgtcccacccaaggactggcacagaggctgcaggtgtgatgtggagagaagcatgcggggaaaatgtgaagtggcatacatgatagagtcctgaatcctgacaaaggaaaggcccagctagatctgagagccaatggctgctgcagggtgcacatcaggaatccccacatccccctcaaggtagcattttcccaggaagaaagaaagaggctgggtgcggtggctcacacctgtaatcccagcactttgggaggctgaggcaggcagatcacctgaggtcaggagtttgacaccagcttggccaacatgaggaaaccccatctctactaaagaccaggcgtagtgctgggcacctgtaatcccagctactcaggaggctgaggcagaggaatccttgaacctaggaggtggaggttgcagtaagccaagatcacaccactgcactccagcctgggcaacagagcgagactccatcaaaagaagaagaaaaggaaagaaggggtaaggaggagaaaagacgggaaaggaggggaagggaggggaagagaggggaagagaggggaagggaagggaagggaggagaagggaagagaagggaagggagggaaaggaaagggaagggaagggaagggaagggaagggaagggaagggaagggaaaggaaggggagtggaggggagaggagcagaggggggaggggagggggaggggaagggaagggagaaagaaaagaaagaaagagagagaaaagaaaagaaagaaagaaaagaaagaaagaaggaaggaaggacgggagggggggagggagggaggaaggaagggaggaaggaaggagaaagaaagaaactcaacagtgtcaatgagccattttccaggtcctgagtgaaatgaccagcgctccccactggagggtctgaatgggtatgttttctctgtcttggggatggtcatacaagctggggtggtccttaagcacatacactgcccagcaggacttccttcttcctgctggaaaagctagacaccagcatgcgctcagagccaagccggacatctggggattctgctcacaggtttcagagggaaacctccctttaggggccaacctacaggtcagggcatagtctgtgtgtatgctttcttttggaaaccgagatcctattcctcccaaccataatccatataaaaagaacggtaaaggatggattgtaaaggttgggactgaagctaggattctgggcaccactacctggccattctgagtctaacatctcccatttactcctcaccgaagccaccctgtgaccgctgccttggttgcttcctgcctccttgcctcttgcctagacaatggcaggagcctctgacctcctcgtcctcttgctcctcacctgcttttccatcttccctgaccagaccccaaagccaagccaaactatgtctgaggcaggacccaggaaaggtcaagctgcctcctgcttctgttgcttgtacatgctgttccctctttgcgaatgcccttcccgccccgatgcctgactcaaacatcacctgcagactctcaggttcagggggacttccccttttctgggctgtcccggcacccgtagacattgattctaacacacagctccaccactcactccctggaggcccctgaacccatgacaatgcttctttgagcttcctaatggtgaatgattccatcacagacccttcttccttggcccacacaggagcttgataaaatgatgaaggtggccaggcgtggtggctcatgcctgtaatcccagcattttgggaggccacggcaggcagatggcttaaggtcaggagttcgagaccagcctggccaacatagtgaaaccccgtctctactaaaaatacaaaaattagctaggcgtggtggcgggcgcctgtaatcccagctactcaggaggctgaggcaggagaatcgcttgaacccgggaggcggaggttgcagtgagccaagatcacgccactgcactccagcctgggtgacagagcgagatcctatctcaaataaataaataaataaataaataataatgcaggtaaaattgtcagtccagcaccagctgcagaagtacatgccccaccaaaactgagtgagtgggatctaaacacaaaccacttcgctccaaggttgagcttggatctcacatcctgcatgacgggatcttctgatactggcacaagccaccagaagccaagagacagggagagaggggccaaatgcagtggctcatgcctgtaatcccagcactctggcaggccgaagtgggagggtcacttgaggccaggagttcaagaccagcctgagcaacatatggagatgccatctctacgaaaataaaataaaataattagccaggcatggtggtgcacacctgtagtcccatctacttgagaggctgaggaggggggattgcttgagcccaggaggtcaaggctgcagtgagctgtgattgtaccagtgcgctccagcctgggtgatagagtaagaccctgtctcgaaaaaaaaaaaaaaaaaaaaaagagaaagagagagaaagaaaggcatagacagattctccctcagggcctccaaaagggaccagccctgatgacaccttgccttcacacttcttctcgtgaactgtgggacaatacatttctgttgttttaagccacctggtttgggctaccttactagcccaaggagactaggacagcagcctttcctgccgcctccaagagagagctttggccttcactgcacacctctggcagacactggaaccccaataatatcatcgaaaaacagccctgcttaatgttctcagtgtctactgagactaactcatttaaccctttaacgcccagcgaggctccgacacaccaacagattgaataacgtgcccaagatcagcagctctatgagtataaaccgggatcccaagcaccctctctgttcaccaccaggatttcctggtactttgtggggagcctgtgaattaagacccataggccaaaccggatccaccacctgtcttttgggcccacaagctaaagatggttttcatctttttcaaatggttaggaggaaaaaaaattaaaagaagaatgattattttgtgacaggtgaaaattctatggagttcggatttcagtgtctagaaatcaagttttattggaacacagccatatctattcaggtaagagatcatctaggttgcttttatgctataagggctgagttgagtcgctgccacagggattgtgtggctggcaaagacagaaatatttcctatctggccctttacagagaaagctccatgctatcatatatgataccagtccaggcacgcccttgctaggccagggagtcagggacaacagctccacttacaccaagtccctctcactcacacacatgcgtccccacctcctcctcacccggctttgacggttggtgaatcagaggctgatctcatcccactcctgcctccctgacagcacagatgacgcatcctccccaaagccccccaggctgagcccacccatccctgcctcctcaacatcatagaggctctcgccctcctaaatcccccaagctgacactgtcccacccctgcctaccttatagcaccaatgcagtcccaactccccactgaatggaggaaggctatgtatttggggggctgagtacctcagcgcaggtgcccatgtagttgtagacactgagcgggatcttgacctgctccccacggatgatgagagcggggagcatgaagtccacgaagaagggcttgaaggtcttcagcagggagggctcggcgatgcctaagccctgagaggtggacagggccacggcctcacccacccagctggtgatggagtccgggaccttcacactgagtgtcccctcaccagatgggtcactgcggagagacagacagccatgatggggggcccttctccagggccatgcctcaggggggccagtgggcatggatgacccaggctgcatggctcagagaggcaccctaggagcttagaaacaagcattgaaggcatcacaaaagcggcaacaggaaaaaaactgtccctcagccctgactctaatagaaaacatgggctgggcgcagtggctcatgcctgtaataccagcactctgagaggccgaggtgggagactgcccgagcccaggagttccggaccaccctaggcaagatgatgagaccgtgttgctacaaaaaatttaaaaattaggtgggtatagtgacacatgcctgtaggcccagctactcaggaggctgaagtgggggattcacttgagcccaggtggtcgagggtgcagtgagctgtgatcccgccactgcagtccagcctcagcaacagagtgagatccctgtcacacacacacaaaaatattattgaaagaaactaaaaaagacaaaaaaagacataaataaatgaaaacatttcccatgttcatggatcggaaagacttgttaaaatgtcaaaactacccaaagtgatctatagattcaatggaacccctatcataaaccccaatgactttttattttattttattttgcagaaatagaaaactccaccttgagattttacatggatctcaagggatcctggtggccaaacaaagaaaccagaagaataaagctggagagctcacacttcaaaacttaccacaaagctaccatattcaaatcaatgtgttactggcataaagacagacatacagaccaatggaatcaaatagagagcccaggaataaaccttgacgacacagataaatgatttttgacaagggcatcaagatactttagggaaaagacaatctttttaacaaatactgctagaaaaagcaaacatccatatgcaaaagaatgaatttggaccttacctaacaccatatacaaaagttaactcaaaatgaatccatgacttgaaagtaaaaactaaaactataaaactcttagaagaaaacagggcaaaagcttcatgacattgggtttgacaatgatttcatggatatgaaaacaaaggtacaagcaaaaaaaaaaaaaaaagagtagacaagttggactttatgaaaactgcaaaattttgagcatcaaaagacactattcaagggctggcatggtagcttactcctgtaatcccagcactttgggaggccaaggaaggaggatcacttgagcccaggagtttgagaccagcctgagcaacacagcaagaccctatctttacaaaaaattaaaaaatttagccaggagtggtggtgtgtacctgtagacccagctacttgggaggctgaggttgggggatcacttgaacacctgggtgacagagtgagaccttgtctcaaaaaaaaaaaaaaaaaaggcactatcaacagagtaaaaagtcaacccagtgggagaaaatatttgcaagtcatatatctgataaggaaataatatccagaatatatagagaactcctgaaactcaataacaaaaacagcaacatgattcaaaaatgggcaaattacttgaatagacatttcaccaaagaagatagacaaatgactgataaatacatgaaagatgctcaacatcactaatcattagggaaatgcaaataaaaaccacaatgagatgccacttcatgtacttaattaggatattaaaaaagaaaaggcaagaaaaaaggctgggcatggtggctcacacctataatcccagcactttgggaggccgaggtgggtggatcacttgaggtcaggagtctggccattgtgaataacgctgtgaacatgggtatacaaatatccctttgagaccctgcttcccattcttttgggtatacacccagaagtagtgggtgaaaccccgtctctactaaaaatacgaaaattagccaggtgtggtggtgcgtgtctgtagttccagctatttgggaggctgaggcaggagaattgtgtgaacctgggaggcggagggtgcagtgagctgagattgcaccactgcactcctgcctgggtgacagagcgagactctatctcaaaaaaaaaaaaaaagaaaagaaagaaaaagagaacagcaagtgtttctgaggatgtggtaagattggaaccctggtacactgttagtagaaatgtaaaacgctgcagctgctgtggaaattagtctggaggttccttaaaaaattaaacataaaattaccacatgattcagcaattctacttctgggtatacacccaaaagaatgggaagcagggtctcaaagggatatttgtatacccctgttcacagcattattcacaatagccaaaaggtggaagcaactcaagggtccatcgacagaaaataaatggataaacaaaatgagggaatccatgcaataggatattattcaaccttaaaagggaaggaggctgggtacagtggctcacgcctgtaatcccagcactttgggaggccgaggggggtggatcacgaggtcaggaaatcgagatcatcctggtcaacatggtgaaaccccatctctactaaaatacaaaaaattagctaggcattggctgggcacggtggctcatgcctgcaatcccagcactttgggaggccgaggcgggcggatcacgaggtcaggagatcgataccatcctgggtaacacggtgaaaccccgtctctactaaaaatacaaaaaattagcagggcatggtggtgggcggctgtggtcccagctactcaggaggctgaggcaggagaatggcgtgaacccaggaggcagagtttgcagtgagccgagatcgcaccactgcactccagcctgggcaacagagcaagatgctgtctcacacacaaacacacaaaaatagctgggcatggtggcgcatgcctatagtcccagctatttggaaggttaaggcagaggaatcacttgaaccctggaggcagaggttgcagtgagccgagattgtgccactgcactccagcctggtgacagagcaagactccatctcaagaaaaaaaaaaaaaagagagaaggaaattctgacatggattctccaacaaagatgaaccttggggacatgttgaaataagccagtcacaaaacgacaaatactacatgattccacttacaggcggtccctagaatagtcaaactcagagacagaaagggttgttaccaaaggctgggggaagggaagagaggggagtgagtgtttaatgggacagagtgtcagttttgtaagatgaaaggagtcacagaaatgggtgatggtgatgttggcacaataacgtgagtgtccttaataccactgaactatacacttaaaaatggttaagatcgtaaattttatgtggagtatttcaccataattttttaaaccaattcatttttgaatcattttccctttttgagacagggtctcactctgtagcccaggctggagtgcagtggtgtaatttcgtgtcactgcagcctcaacctcctgggctcaagcgatcctcccacttcagcttcccaagtagctaggaccacaagcatgtgccaccacacctggctaatttaaaaattttttttagagatggggccttgctatgttgcccaggctggtcttgaactcctgggctcaagcaatcctcctgcctcagcctctcaaagtgctgggattacaggcataagccaccacaccccgcctttaaacgggtgtggtttaaaagagagttgaccagtcctcttttgggtccagcaggaacctcctccctggtctcagatctgtcccctctgattcatccttgctccagccaacaagagaggagagagaacatcccgaatcctaaatcccaaatccctggctctccacacctgcacccctaaccccacccccacagcccacatggtctcatactccctgcatcctcctcagctccttccatctcatttcaaccatgtggaaatccaccagcctctcctactttgcagcacttgctcatgctggtccttcctggacacccttccctttcttgcttattcatatggtgggactcagcttgggccctacattgaggaccctctctggcttttccaaaggattccaccatctttctctgcctcccaagctccatgcccagccttccagaagactaaccccactgcaccatgatggctctttaggcacctgtctactctagctacaatgaaaatgttatgagtgctgggactctgtctaccttattcaagggaccatccttaacatcaaaaacatccgggccaggagcagtagctcacacctgtaattctaacacgttgagaggccaagacaggaagatcacttgaggccaggagtttcagaccagcctgggcaacatacagagaccccatctctatgaaatatttttttttttttgagacggagtcttgctctgtcacccaggctggagagcagtggcgccatcttggctcactgcaacctccgtctcccaggttcatgccactctcttacctcagcctcccgagtagctgggactacaggcgcccgccaccatgcccagctattttttgcgtttttagtagagacagggtttcaccatgttagagagggtggtctcgatctcctgatctcgtgatccacctgcctcagcctcccaaagtgctgggattacaggcatgagctaccatgcccagccctaataaaagttaattgaaaaaattttttaacaataaaaaaagctcaccagacatccagaaagtagatacatttgaatgatgatggacagatagcctgtcttacagctgggcccccagaacaaaacacagtgaactggatgtgttctgatcagcagtcaaaccttcccacgatgaggacatacacatcccccaaagcagtctgaggggcccccagctgcgtgcctggctctgccaagcacttgccacagcaccttgtgcctggaggaagggcacagctccagcagtcagcccacctgctggcccgggctggaccaagagtcagttttcatgccaaactggtttgccggggcacgccagtgccactttttactagtgtcattggtgctctaacgctgagcattgcaagaaaaaaagtcaattgcatccagcagaaaagggttgcctacactcctgcttcaaagagaactaaacggggaaaaatgcagaaaggaaatgtgttgagaaaggcatcctgttttttgagcaagagctgtagtcccctgaggagcaaggagtgggggtaggtggagtcaagttcatgttccagggaactgtaatcattttaatgagctcgttatacaaacagagcagatagagtaaccccaagagggagttataagaggcacaaagcccttgcatttcatatttcacaggcaaacgtccaaatgtgcagcgggactcaaggctggcttcatggcttgaagttttgtgtgttagaaaaagatgcacagtgtcttgctcagatgttggtatcaggcctgcccatctcaccggaggctctctggacccgcatgagtgtctttcactcaaccggcaaagtcagcgcagaaaagaaatcttaatgtacctgatgttgagacaatgccaaatccatgtttcggggaagaaagtcctttttctcttctctgttctatgaaaagaaaaaaagaaacgattaaggtttcatgaacataacaaatcttatgtgaacctagcagctttgcattctatttgatcagatataacgcgttaatttcttttacctggaagggttaacattgtacttcactgggatataacatgttaattctcttacctggcagggttaacagtctacttgattaggacataacttgtttttttaaaaactttattttaggttcagaagtacatgtgcaggtctgttacataggtaaatgtgtgtcatgggggtttgttgtacagattatttcatcacccagatactaagcctatgcccaatagttattatttctgatcctctctgtcttcccatcccccatcctcaagtagacctgtgtctgttcccccttttgtttccatgtgttctcatcatttagcttccacttataagtgagaacatgcagtatttggttttctgttcctgcattagtttgctaaggataatgggctccagctccatccatgtttccacaaaagacatgattttgttcttttttatggctgcatagtattccatggtatttctgtaccacattttatttatccaatctgtcattgatgagcatttaggttgattccaggtctttgctattgtaaatagtgctgcagtgaacatttgtgtgcatgggtctttatggtagaatgatttatattcctttgagtatatactcagtaatgggattgctggctcaaatggtagtactgtttttagttctttgagcaatcaccacactgctttccacaatggttgaactaatttacactcccatcaactatgcatagcatccccttttctccactacctcaccaacatctgttatttttttactttttttttcttttttttttttgagatggagtttccttcttgtcacccaggctggagtgcaatggcacaatctcagctcactgcaacatctgcctcccaggttcaaacgattctccagcctcagcctcccgagtagctaggattacaggcgcctgccactacacccagctaattttgtatttttagtagagacgcagtttcaccatgttggtcaggctggtctcaaaatcctgacctcaggtgatccacctgcctcggcctcccaaagttctggaattacaggcatgagccaccacactcagcttatttgttgactctttaataatggccattctgactggcatgagatggcatctcattgtggttttgatttgcatttccctttttttttttttttgagatggagtcttgctctgtcacccaggctggagtgcagtggtgcaatctctgctcactgcaacctccacctcccaggttcaagtgattctcatgcctcagcctcctgaattacacctggaattgcaggtgtgccaccacgcccggctaatttttgtatttttagtagagatggggttttgtcatgttgaccacgctggtctcaaactcccgacatcaagtgatccacccgcctcggcctcccaaagtgctgggattacaggtgtgggccactgtgcctggcctgatttgcatttctctagttcagtgacattgaggtttttttcatatgcttgttggctgcacgtatattttcttttttttttttcgagatggagtctctctctgttgcccagactggagtgcaatggcacaatctcggttcactgcagcctccgcctcccaggttcgagcaattctcctgcctcagcctcctgagtagctgggattacaggcgtccaccaccatgtccggctaatttttgtatttttagtagagatggggtttcaccatattggccaggctggtctcgaactcctgaccttgtgatccacccacctcagcctctcaaagtggtggtattacaggcataagccaccacgcccggcctgcatgtgtatcttctttgaaaagtgtctgctcaaggatgtaacttgttaactcttttacctggcagcgttaacattctacttaagaatagaagaagcaaggtatcaaaggcttggcagagtccatctttaaacagtcgtgcctcctctcctggatgcagaagggataaaggcctgcaggggccaccctatatccctccctttgctaatttccctccctgggttttaccacgttcatcttcatcatcacactgaactctccacctcctgctcacccatcctctgtttcctaaggagtgccttcatgcattcttgtttgagcctcagaagcctcacagttcaccctcctcaaaggctgctccttctcctttctcaaaaaaaaaaaaaaggctttctcaaaatttggcaaaaataaaaatgctcctatcctttcaaccatcaacacctctcctaggagcagaccccggaaacacccgcagacgtgtgtgcaaacacagagagatggagtggttcatcgtggcactaggaaaattagcaaatagcccaaatctccatcattaggaggactggaaaatcaaatgatagtatattcattggtggactattatatatttgtaaaaaaaaaaaagagtgaggtaaacatgcatttactgatatggaatgatttccaagacttgttgttaactttcaaaagaaatgtacaaaatgacattatggtattcttctattctttttttttttaatcctacatatgcacagaagaatatctaagaaattattcagactgggcacagtggctcacacctgtaatcccagcacttcgggagactgaggtgggtggatcactggaggtcaggagttcaagaccagcctggccaacatggtgaaaccccctctctactaaaaatacaaaagttagccgggtttggtggtgcaggcctgtaatcccagctactcaggaggctgagacaggagtatcacttgaacatggaaggcagtgagctgagatcccatcactgcactccagcatgggcaacagagtgagactcctcctcaaaaaaaaaaaattattcagctttcccttctgaagaagggaatggagggtctgagggtgggaaggagacttaaatttcattatatatcctcttctactgcttgaaaaaaatgttaaccacatttacatggttaaaaaaatatgttggggctattccaagatggccaaataggaacagctccagtctgtagctcccagtgtgattgacacggaagatgggtgatttctgcatttccaactgaggtacctggttcatctcattgggactggttggacagtgggtacagcccatgaaggatgagccgcagtagggcggggtgtcgccttacccgggaagcacaaggggtcaggggatttccctttcctagccaagggaagccgggatagactgtacctggaaaaacaggacactctcgcccaaatactgagcttttcccatggtcttagcaaccagcagaccaggagattctctcccatgcctggctgggcgggtcccacgcccgcagagccttgctcactgctagcacagcagtctgagatcgaactgcgacgtggcagcctggttgggggaggggtgcccaccattgctgaggctggagtaagtaaacaaagtggctgggaagcttaaactgggcggagcccactgcagctcagcaaggcctactgcctctatagactccacctctgtgagcagggcatggctgaacaaaaggcagcagacagtttctgcagacttaaacgtccctgtctgacagctctgaagacagcagtcattctcccagcatggcgtttcagctctgagaacggacagactgcctcctcaagtgggtccctgacccccatgtagcctaactgggagacacctcccaggaggggccgacaaacacctcatataggcgggtacccctctgagacgaagcttccagaggaaggatcaggcagcaatatttgctgttctgcaatatttgctgttctgcagcctccactggtgatacgcaggcagacagggtctagagtggacctccaccaaactccaacagacctgcagctgagagacctgacgttagaaggaaaattaacaaacagaaaggaatagcatcaacatcaacaaaaaggacatctacaccaaagccccatctgtaggttaccagcatcaaagaccaaaggtagataaaaccacaaagatggggagatacaagagcagaaaagctgataattctaaaaacctgcgcgcctcttctcctccaaaggatagtagctccttgccagcaatggaacaaagctggacggagaatgactttgacaaattgacagaagtaggcttcagaaggttggtaataacaaacttctctgagctaaaggagcacgttcaaacccatcgcaaggaagctaaaaaccttgaataaaggttagacgaatggctaactagaataaacagcatagagaagaacttaaatgacctgatggagctgaaaaccatggcacgagaactttgtgacgcaggcacaagtttcaatagccgattcgatcaagtggaagaaagggtatcagtgattgaagattaaattaatgaaataaagcaaaaagacaaggttagagaaaaaagagtaaaaagaaatgaacaaagtctccaagaaatatgggactatgtgaaaagaccaaatctacgtctgattggtgtacctgaaagtgatggggagaatggaaccaagttggaaaacactctgcaggatattatccaggagaacttccccaacctagcaaggcaggccaacattcaaattcaggaaataaagagaacaccacaaagatattcctcaggaagagcaaccccaagacacataattgtcagattcaccaaagttgaaatgaaggaaaaaatgttaagagcagccagagagaaaggtcgggttaaccacaaagggaagcccatcagactaacagcagatctcttggcagaaaccctacaagccagaagagagtgggggccaatattcaacattcttaaagaaaagaattctcaatccagaatttcatatccggccaaactaagcttcataagtgaaggagaaataaaatcctttacagacaagcaaatgctgagagattttgtcaccaccaggcctgcctttcaagagctcctgaaggaagcactaaacatagaaaggaacaaccagtaccagccactgcaaaaatatgccagattgtaaagaccgttgatgctatgaagaaactgcatcaattaatgggcaaaataaccagctaatatcataatgacaggatcaaattcacacataacaatattaaccttaaatgtaaatgggctaaatgccccaattaaaagacacagactggcaaattggataaagagtcaagacccattattgtgctgtattcaggagacccatctcatgtgcagagacacacatagtctcaaaataaatggatggaggaagatctaccaagcaaatggaaagcaaaaaaaggcaggggttgcaatcctagtctctgataaaacagactttaaaccaacaaagatcaaaagagacaaagaaggccattacataatggtaaaggaatcaattcaacaagaagagctaactatcctaaatgtatatgcatgcaatacaggagcacccagattcataaagcaagtccttagagacctacaaagagacttagactcccacacaatactaatgggagactttaacacccctctatcaatattagacagatcagtgagacagaaggttaacaaggatatccaggaattgaactcagctctgcaccaagcagacctaatagacatctacagaactctccatcctaaatcaacagaatatacattcttctcagcatcacatcacacttattctgaaattgaccacataattggaagtaaagcactcctcagcaaatgtaaaagaacagaaatcacaacaaactgtcagaccacagcacaatcaaattagaactcaggattaagaaactcactcaaaaccacacaaccacatggaaactgaacaacctgctcctgaatgactgctgggtaaataacggaatgaaggcagaaataaagatgttctttgaaaccaatgagaacaaagacacaacacaccagaatctctgggacacatttaaagcagtgtgtagagggaaatttatagcactaaatgcccacaagagaaagcaggaaagatctaaaatcgacaccctaacatcacaattaaaagaactagagaagcaagagcaaacaaattcaaaagctagcagaaggcaagaaataactaaggtcagagcagaactgaaagagacagagacacaaaaacccttcaaaaaaatcaatgaatccaggagctggttttttgaaaagatcaacaaaattgatagaccactagcaagactaataaagaagaaaagagagaagaatcaaatagacgcaataaaaaatgataaaggggatatcaccaccgatcccacagaaatacaaactaccatcagagaatactgtaaacacctctacgcaaataaaccagaaaatctagaagaaatggataaattcctggacacatacaccctcccaagactaaaccaggaagaacgtgaatctctgaatagaccaataacaggctctgaaatcgaggcaataattaatagcctaccaaccaaaaaaagtccaggaccagaaggattcacagctgaattccaccagaagtacaaagaggagctgataccattccttctgaaactattctaatcaagaaaaagaaggaatcctccctaactcattttatgaggccagcatcatcctgataccaaagcctggcagagacacaacaaaaaaaagagaattttagaccaatatccttgatgaacatcgatgcaaaaatcctcaataaaatactggcaaacaaaatccagcagcacatcaaaaagcttcttatccaccacgatcaagtcagcttcatctctgggatgcaagcctggttcaacgtacacaaatcaataaacgaaatccatcacatagacagaaccattgacaaaaaccacatgatcatctcaatagatgcaaaaaaggtcttcgggctgggcacggtggctcacgcctgtaatcctagcactttgggaggctgaggcaggcagatcacaaggtgaggagatcgagaccatcctggctaacacggtgataccctgtctctactaaaaatacaaaaaattagccgggcatagtggcgggcgcctgtagtcccagctactcaggaggctgaggcaggagaatggtgtgaacctgggaggcagagcttgcagtgagccgatatcgcaccactgcactccagcctgggtgacagagtgagactccatctcaaaaaaaaaaggtcttcgacaaaattcaacagcccttcatgctaaaaactctcaataaactaggtattgatggaatatatctcaaaataataagggctatttatgacaaacccacagccaatatcatactgaatggacaaaaactggaagcattccctttgaaaactggcacaagacaaggatgccctctctcaccactcctattcaacgtagtgttggaagttctggccagggcaatcaggtaagagaaggaaataaagggtattcaatcaggaaaagaggaagtcaaattgtccctgtttgcagatgacatgattgtatatttagaaaaccccatcatctcagcccaaaacctccttcagctgatatgcaacttcagcaaagtctcaggatacaaaatcaatgtgcaaaaatcacaaaaatcctatacaccaattaacagacaaacagagagccaaatcatgagtgaaatcccattcacaattgctacaaagataataaaatacctaggaatccaacttacaagggatgtgaaggacctcttcaaggagaactacaaaccactgctcaatgaaataaaagaggacacaaacaaatggaagaacattccatgctaacggataggaagaatcaatatagttaaaatggccatactgcccaaggtaatttatagattcaatgccatccccatcaagctaccaatgactttcttcacagaattggaaaaaactactttaaagttcatatggaaccaaaaagagcccacattgccaagacaatcctaagcaaaaagaacaaagcgggaggcatcacgctacctgagttcaaactatactacaaggctacagtaaccaaaacagcatggtactggtaccaaaacagatatatagaccaatggaacagaacagaggcctcagaaataacaccacgcatctacaaccatctgatctttgacaaacctgacaaaaacaagaaatggggaatggattcgctatttaataaatggtgctgggaaaactgggtagccatatgtagaaagctgaaactggatcccttccttacatcttatacaaaaattaattcaagatggattaaagacttaaatgttagacctaaaaccataaaaactgtagaagaaaacctaggcaataccattcaagacataggcatgggcaaagacttcacgactaaaacaccaaaagcaatggcaacaaaagccaaaatagacaaatgggatctaattaaactaaagagcttctgcatggcaaaagaaactaccatcagagtgaacaggcaacctacagattgggagaaaatttttgcaatctacccatcggacaaagcgctaatatccaaaatctacaaagaactcaaacaaatttacaagaaaaaaacaaacaaccccatcaaaaagtgggcaaaggatatgaacagacatttctcaaaagaagacatttatgcatccaacacatgaaaaaatgctcatcatcactggccatcagagaaatgcaaatcaaaaccacaatgagataccatctcatgccaattagaatggcgatcattaaaaagtcaggaaacaacaaatgctggagaggatgtggagaaataggaatgcttttacactgttggtgggagtgtaaattagttcaaccattgtggaagacagtgtggcgattcctcaaggatctagaactagaaataccatttcacccagcaatcccgttactggatatatacccaaaggattataaattatgctactataaagacacatgcacacgtatgtttattgtggcactattcacaatagcaaagacttggaaccaacccaaatgtccatcaatgatagactggattaagaaaatgtggcacatatacaccatggaatactatgcagccataaaaaaggatgcgttcatgtcctttgcagggacatggatgaagccagaaaccatcattctcagcaaactatcacaaagacagaaaaccaaatactgcatgttctcactcataggtgggaactgaacaatgagaacacctggacacagggcggggaacatcacactctggggcctgtcggggggtggggggccgggggagggatagcattaggagtaatacctaatgtaaatgatgagttgatgggtgcagcaaaccaacatgggacatgtatacctatcaaacttgcacattgtgcacatgtaccctagaacttaaagtataattttttaaaaaaagaaaatacatatataattaaaaatatatggccaggtgcagtggctcatgcctgtaatcccagcactttgggaggccaaggctggcggatcatgaggtcaggagatggagaccatcctggctaacatggtgaaaccccgtctctactaaaaaatacaacaaaaattagccaggcatggtggtgggtgcctgtagtcccaggtacttgggaggctgaggcaggagaatggcatgaaaccggtaggcagagcttgtagtaagccaagatggcgccactacactccagcctgggcaacagagtgagactctgtctcaccaaaatatatatatatatgtatatatatacacacatatgtgcgtgtatatacttgtatatatgtgcatatatacacacacatgtgtgtgtatatatgtgcatatatacacacacatgtgtgtatatatatacatgttgctctcagaataaggatgtgtttgttccaattacaaaaaagcatgggcacttgattttgaaggcatttcttatgcctttctccattgtgatttacaattgccttcatggttttgagttttacaaagctgctgcttctataccagccccaggacaagctctcaggggttatgcatgtgagtgggtcagggcctctggggtggctgccagctgacagaggccctggggccagcattccaatcttcctcatccaatcacatcttgaaatgcttccatgtgtatccaaactacagtatgaagcctaatctgccaattccccgattaggagttgggaaactaggaaccctgtaggcctgctaaacgtgtggccccagcaggaagagcctgggggactgaagcatccaggagccactggggagcagacggaggggcacaagaaggttcctgttttatatagagagggcttgaaagatggagaacacttccatggacaggctcatcagggctggccaccaaatcaagaggtttcctggacaggtcatacatcaaaatgggcatcattccaaaagttagaacctatttggcagtgagcaatactggaaatacttcatagcacaatgtgactgcagccaaagcagtactcagaggaaaattcataatcctctaatggcttaagtgtttttatttatttatttatttatttttaaattagagacagagtctcactctgtcactcaggctggagtgcagtggcacaatcacagctcactgcagcctcaaccttcccaggctcaagcaatcctccagtctcagcctcccaagtagctgggactacaggcatgagccaccacacatggttaatttttgtatttgtgtagagacaaggttttgccatgtgcccaggctggtctcaaactcctaggctcaagtgatctgcctgccttggccttccaaagtgctggggttacaggcatgagccactgtgcccagccaagtgtttatatttaagatgagaaagactgaaaagtaattactttgtgtcaactcatgaaggtagagttggagaagaaggagaaacagagtaaaaggaagaggagggaaggatgagaggaaggagaaaggacaaaataaagaactctctaaacagagtctctgagagttgggagatcaagccccaggttctcaccctgcccagatccctctgtcctcagacaggtcagctctcctgattcattttcttctctcttccatatccctaatcttgtgcactggggtagggctaagaattgggtagggaggaggtatatgaagcaatcagtgtcctagcctgctatgccaatggcccccagggaacattgggcaatgtctggagatattgttggttgttacaactgggaaggagtgtgactgacatctagtgggtggaggtcagggatgctgctcaacactctacagtgcagaggacacccctcacagtgcacagaataatcctaccctgcaatggactcaatgtttgcatccccctgaaaattcatatgttcaaatcttaacctccgaggtgatggtgttgaggtgaagcttctaggagatgatcaggttatgaaagtggattgctcatgaatgggattagggcccttataaaagggactctaggccgggtgcagaggctcacgcctgtaatcccagcactttgagaggccacagcaggcaaatcacttgaggccaggagtttgagaccagtgtgcctaacatggtgaaatcctgtctctactaaaaatacaaaaattagctgggcatggtggcatgtaatcccagctactcaggaggctgaggcaggagaatcacttgaatctgggaggtggaggttgcagtgagccaagctcgtaccactgcactccagcctgggcaacagagccaggctccatctcaaaaaaaaaaaaaaaacaaaaacaacgaaaaacttactaatagcagttgttaatattatactttaaaaacacctattattgccaggcgcagtggctcatgcctgtaatcccagcactttgggaagccaaggtgggcgaatcacaaggtcaggagatcgagaccatcctggctaacacagtgaaaccccgtctctactaaaaatacaaaaaaaaaaaaaattagcggggtgtggcgggcgcctatagtctcagctactcaggaggctgaggcaggagaatggcgtgaacctgggaggcggagcttgcagtgagctgagatcgcactactgcactccagcctgggagacagagcaagactctgtctcaaaaaaaaaaaaaaaaaagaaagaaagagagaaagacacctgttatttagttaaaattttcttccaggccaggtacagtgactcacacctgtaatcccagcactttgagaggctgcggcaggcaaatcacttgaggccaggagttcatgaccagcctggccaacatggtgaaaccctgtctctactaaaaatacgaaaattagacaggcatggtggcatgcctgtaatcccagctactcaggaggctgaggcaggagaatcacttgaacctgggaggtggaggttgcagggagccaagatcacaccactgggggtgtggtcacacagcctgggggacagattgagtgagactccatctcaaaaaaaaaaaggctccagagagctccctcactccttctgccatatgaggatacagcaagaagccagagggcaccatcaatgaagcaggaagtgagccctcaccagacacccaatcagctggtgccctgttcttggacttccaagccccaagaaccatgtgaaataaatttcagttgtttataagccactcggtctatggtcttctgttatagcagccaggaaggacaaagacaagccccagatgttaataggaccagggttagaaaaccttgctcaatgtataagccgttacctgggggggtgcctggaaggagccactgccaccaggctccctgtgtggggctggaaagcggggacagcctcatcggtgtagaggccaccgtcctgccggtggttcaggctcactcggtcggtcatcaccaccagtcccgtttcctaggcaacagacaacacccaaaccattggtggggaagtggatgctgacagcccccagaagcataagggaatgaatcaccctgtggccactgtcccaatatcagcttgtggcaaccttgggggcatcattctttttttgcttttttgggtttgttttgttttgttttgtttgtttgttgttttttgagacggagtctcgctctgtcgcccaggctggagtgcagtggcgcaatcttggctcactggaagctccacctcccaggttcacgcctatctcctgcctcagcctccctagtagctgggactacaggtgcccgtcaccatggggcatcattcttttactctgggtttggtggcacaggctggggagaacgtgggacccagtgaccatccagggtggagaagagagaacagcacatttgaactgtgcaaccaaatcagatggtccaaacacaaaaggccatatgttgtatgattccgttgagatgaaacgcccagaacaggcaaatccatagagacagaaagcagatcaactggtgactgccaggggctgagggaggggaaatggggagtaattgctactggggatggggtttccttttgggggatgaaaatggtctggaattaagtaggggtggtggttgcacagcactgtgaatataataaatgccactgaattttaaacggtgagttttatgttatatgaatttcatctcgattagaaaaatcatggccaggcatagtggcacatgcctgtaatcccagcattttgggaggccgaggtgggcggatcacttgagatcaggagttcaacaccagcctggccaacacggtgaaaccccatctctactaaaaatacaagaattagccaggcatggtggtgggcacctgtaatcccagctacttgggaggctgaggcaggagaatcactggaacccaggaggcggaggttgcagtgagccaagatcacaccactgcactccagcctgggcaatagagcaagactccatctcaaaagaaaaagaaaagaaaagaaggaaggggaagtgaggggagagcaggggaggaaatcagttggcgcagtacctgaccccaaccaaggaccaacggtgggatgcaatgatctcttttattagtattagtattattagagacggcctccatctgtggttcaggctggggtgcagtgctgcaatcatagctcactgcagcctcaaactcccaggctcaagtgatcctcccacctcagcctcttgagtagctgggactagaggagtgcaccaccatgcccggctatgcaattagtctttttattctgtcctcatcattgtactaattactgggagcaactggatttgaaagaagactcactgtagcctgggctgacttggatttgtgaacaagaattttttttttttagacggagtctcactctgtcgcccaggctggagtgcagtggcgcgatctcggctcactgtaagctccgcctcccaggttcatgccattctctcctgcctcattctcctgagtagctgggactactggcgcccgccaccacgcccggctaattttttgtatttttagtagagacggggtttcactgtgttagccaagatggtctcgatctcctgacctcgtgatccgcccgtctcagcctcccaaagtgctgggattacaggcgtgagccaccgcgcccagcctttgaataagaaattcaaacccagttcctttgactcaaaggcgtcacctctgacttccagaagggacctggagttcaaactgccaggcagttcacatactcataaatgaaatgttatttttcaaaacaaaaaacaaaacacaaaggtttattttgccaggtacagtggtgtatgtctgtaatcccagcacttcgggaggctaacgcgggtggatccattaagcccaggagttcaagactagcctgggtgacatggtgaaaccccatctctataaatacgaaaaaaattagcgaggcatgatggcgtgtgtctgtggtcccagctactcaggaggctgaggcaggaggatcgcttgagcccaggaggtcgagactgaagtgagctgagatcacgccactgcataccagcctgggtgacaaagtgagatcttgtctcaaaaaaagaaaaataagagatttttttgtttgtttgttttgtttttagcaaatagaactgtgggaactaggtggcaggcatgtgggtatttgtctaattcgctcaacttttctgcatgtttggaaattttcatcataaaagcaacacaggttggggagggaaggatgcctttgaaattttatttatttatttaatttcatttttttgagacagagtctcgctctaccacccaggctggagtgcagtggcgtgatcactgtaacctccgcctcccagttccagagcttctcctgccttagcctcccgagtagctgggattacaggcgcccaccaccacacccagataatttttgtatttttagtagagacggggtttcaccatgttggccaggctggtctcgaactcctgacttcaggtgatccacgtgtcttggcctcccaaagtgctgggattacaggcgtgagacaccacacctggccagaaatattttttaaagctgaaatgaaaggcaccctccaatgggacacgcatttgagtggagaccaccagcaccctaaggtgtgaccctgaagggcgaagcatgctcccatcccaatccctttctatctatatcacatcatgaaaacgtccagagatgggcacctgatagcattagccctttttttttttttttttttttgagacggagtctggctctgtcaccaggctggagtgaagtgatgtgatctctgctcactgcaacctccacctcccgggctcaagtgattctcctgactcagcctcccaagtagctgggactacaggcatgcaccaccacgcccagctaattattgtgtttttagtagagagggggtttcaccgtgttggccaggatggtctcgatctcttgaccttgtgatccgcccacctcagcctcccaaagtgctgggattacaggcatgagccaccgcgctcagccagcattagccctttttttttttgagacggagtctcgctctgtcgcccaggctggagtgcagtggcgcaatcttggctcactgcaagctccgcctcccaggttcacgccattctcctgcctcagcctcccgagtagctgggactacaggcgcccccttagccctttttaagatgggtaaactggagctgggcacagtggctcatgcctctaatcccagcgactagggaggctggggcacgaggatcacctatgcagttcagaccccctgccacctgggatcacagccacctccttctgcttgaaagctgccagacacacaaccaagttaaccaaagccgaggcagagctaagagctactggcacccacagctcccaatgagaaggttttcctcgcagcaaagcacgtcaatgtcataacacgtcccatcacaagttcaagttacccatttgaacctgaccattgacatgcataacattctgctctccacggctttgcaaattggaagaatctacttgtgagctttcactggggagaaatgaaaaagaaaagtttggaaggctgggtgcaatggctcatgcttgtaatcctaacactttgggaagttgaagcaggaggattgcttgaggccaggagtttgacactagccagggccacgtagcaagaccccatctctacaaagaaataaagcaaaataaaattagccaggtgtggtggcatgcacctgtagtgccagctacttgggagactgaggtgggaggatcacttgagcacaggtgtttgaggctgcagtgagctatgatcacaccactgcactccagcctgggccacagagcgagaccccatctcgaaaaaaagaaagaaaagcttccaattctgtttccaacccatttctgaatctccaagactcttatttctaggcaagaggaacttagaagggggcagagggatctgagaccacctctccttacggtgaaggcaaacccagagtccttggtgatgccccaaggccacgggaagacagaggagcgccggcgtcgttgtgccgtcagcccagcccaccaaaaaggaccatcctccctggacacgccaaaggaatcagaaacatcataatcttccagttcctggaaaacctgcaggcaaagggggacagagacttgtcagctgaagttttctttacaacccaaactggctcccgtgggtgtggcatgctcccatcccaacctctttatcacgtcatgacaacctccaggagatgggcactggtagcatcagcccattttaagatgggcaaacaggagccaggcacagtggcccatgcctctaatcccagttactggggaggctgaaacaggaggctggcttgtgcaaaggagttcgagaccagcctgggcaacatagcaagaccccgcccctacaaaagatagaaaaaattagccaggcgtggtggtgcatgcctgtagccccagctactctggaggctgaggtgggaggatcgtttaagcccaggaggtgttcgctacagtgagctatgatcacgccactgcactccagcccaggcaacagagcaacatcccaactctaaaaataatataaaataagatgggcaaattggagccagagaggtgagacctggcccaatgtcatgttgcaaaaatctgatgaccttgactccctgatcttgcaactgtgctgaagcagcaggaaggatttatcagacacccattaggttccctgaaaaatgaacccgacggagaaagcgaatctggattcaaatgccactcttcatttattggaatgagagatgggaaagggagagcaagagaaggtaaagccccgtggaggtctagaacccaagcccgaggggtctgctcacctgggcaggagtcagccggaacccagacctgagcaggtagacactcttatcaactgcggcgacgcacacacagctgccccttgcagccctgatccgcaggtcgacaacctccccaggttgggtctcatttgctgaatacgtcactgaaaccttggcgcaaatgcagcaagggataagaaacttggttcagttggctgtgagtggtggctcacgcctgtaatcccaacactttgggaggccgaggcgggtggatcacctgaggtcaagagttcgagaccagcctggccaacatggtgaaaccccatctctactaaaaatacaaaatttagctgggcatggtggcaggtgcctgtaatcccagctacttaggaggctgaggcaggagaatcgcttgaagcccagagacagaggttgcagggagctgagagagtgtggttgcaccccagccagggcaacaagaatgaaactccatttcaaacaatgaaaaaaagaaacttggttcaatccaggtttggtctagtccagaggcatctcttctgccccacccatgcaccccctgcccaccaaggagagtgggtctttgccagctcagctgggaacctggcctcgctacctgggtgaaactggtcccacactgtgaagggcagctggtcattgtgcagcgggcacaaagaagggaacacagagggacaggcagagatgggaaggcaggtgctggcggagagcctgtggcagtttgtttacaagttgcagggaggagccaggcgcagtggctcacacctgtaatcccagcacttcgggaggctgaagcatgtggatcacttgaggccaggagttcaagaccagcctggccaacatggtgaaaccccatctctactaaaaatacaaaaattagccagacatggtggcacatgcctgtagtctcagctactcgggaggctgaggccggagaattgcttgaacccgggaggcagaggttgcagtgagccgagatcgtgccactgcactccagcctgggtgacagagcttgactccgtctcaaaataataataataataataaagttgttgcagggagggggagaggaggctgagggtgccaatggaaacaagtgctgtcccttaaatcctgaattcaacaaaggcagagaataattgatggctttccccatgtgttttgaatgcaatctccttttgtgtgacttttggagatgcttcagtaaagatgcaactcatgttcccataattccttacatcatgctgcgacacaacatgagtctcaggtgtgcacagaccccctggccagcaccttggagaagccccgatggcccctggctgtgtcccaggttcagtgcacgatgctctacctggttttcgaagaaggtctcgactgcaaactgaaggctgtcggcgaccccttctccattctccctgacgtagaagaccagcaggcgaccaagggggaccatgctgggggtcacggccagatgaagagaggtcacacacacgtcgacctcagcttctggggctggtgggggctctgaggtgagcaaaagtagagagaggtggtgaattctccgcatccgacatgcaacctcagccattcaggctctgccccaatttgccctgcgctatgctcctgtctacgcattgagacagtctgcatctttggttttgagatgcccttcccaggctacatcctcagtcaatgctgactctttctattgactcagctctagggtcaccatgggctcctacagagcaggctggaatttgcctagaatcatcctctctgccggggaacatggtccctgctccctgaccagccctctgcttcctccgcggacaccaaaaccaccttggcttgtccaggcagcaccactgcagctccccaatatgcccctgacctccagtccctccctctgattggctctgtcttgctggggcctggggccagcagacctgggcagccattatttgctgacttgaaccgagttcatactgccttccctgtgggtaaatgatccttaaaggatagaggatcttagaagcctgtccaggcactcccaaatactctacggcaagagaatgagggtagaaaggctcccagttccagaatgggccatctgtcagctggttctgtgcagagctcagagcagccagtggacagggatggtaggggaaagcggggacacaaggaaactcatgggcaacaggaggaagtgggtacccaatcggccttggggttcaaatcttggctctggcccctactaggcaatgggaaagtccctgaaacccccacccccaagtcacagcccattcatctgcagatggacacagtggaaccaccaccatcccaggctgcagtggggttaaatggggacagattgtggggagttccaagcccagggctggccctggacaaggattccagggagacataaagtccctgttatttcacccagaagagaagagaagaccaagagggtgaaggtgcaccatgcccaaagcaggactctggccagcagttctcagccaaggcaattctgctacccaggggatgctggcaatatctgcggatgttttttggtcatcactgctggaggggatgctactggcttccggtgaatagaagccagagatgctattcagcatcctacagtgcatgggatggtcccaaatgttgacagtgcagagggtgagaaagcctgcctaagaaggagggatcttctctgtctgtctatctatccatccatccatctatccactcatctttctatctatccatccatccatctcttcatccatccaccatctacccatccatccactcacccaccatccacccttccctctattcatcaaccatccatcatccacccatccaaccatccacccatccctctattcatcatccatcatccacccacccaccatccatccatttatccatccatcatccacccacccatccaccatccaatcatctatccatctgttcatccatccatctgttcatccatccatcatccactcatccacccaccccactatccatccatctattcttccatccatcatcccccattcatccacccactatccatccatctatccatccaaccatccatctattcatccatccatcatccacccatccacccactatccatccatccattcatctattcatccagtcatcatccgcccacccactatccatccatccatccatctattcatctaatcctcatccacccacccattagccatccatccatccatccttctgtacctccatccatctattcatccatccatctattcatccagccatccatctgtccattcatccatccatctgtccatccatccatctgtccattcatccatccatccatccatccatccatcttttggtccatccatccatccatccatctatcaatccacccatccatctgtccattcatccatccatccatccttctgtccatccatcttttggtccatccatccatccatccatctctctgtccattcatccatctatccacctatccatccatccatccatccttccatctatccactgttctatcagtccatccatccatccatccattcatccatctttctatctgtccatccatccattgatccatccctctatcatctatagggctattggcatctatggggtggaggccagggatgctgctcaatatcctacagtgcctccaccacagagaatgatcttgcccaaatgttgatagtgccaaggttgagaaaccttgccttcgcctgagagatcctgcctatctatctatccacccatcattctgtctatctacctacctatctcagtgtcctcacctggaagtgactctgccccctggggatagtggcaatatctggagactctttaggtcatcatactgtggaaagttggtactactggcatctggtggggagagaccagggatgctgctcagcaccctacagtgcacaggacgcccccactctggagtgatccacccccttatatatgtctatagtgctcaagttggggaccctgtattgagaagaagagctttgaagaggaggggactaaggaagtcccctgggaggagggccttatgaggagcacatggtgtcaaaaagagaagaggaagaggactcataggcagaaccgcctgggcaaagaggcaacagcacaatgtgggccagtgcaagagcctagtctgtggctggctttccctgtcccctgcacacacagagtgagaagagtctggggcctgaacctctccacttccagcagctgatcactgtcttcctggacccagtctggtattgttaaggatgtgtcccctctgacccaaggcatgctcccctctctgctgggtcttgccttgtccctccttgcaggagcacccatctcagtctcaattgttcagaaggaagaacaggaaccttctccctgctgcccggctcacctgtctcagaaaggtgtgttaaacgaatcggtttctccagggcaggggccgcccgcttgcttcgctgctgggtggtgtgggcaggctgctggcccgatagcacaatattgccccgtgcagccacctcgtagtacagggtaaagttgcagggacatgtggacttcacagaaaaataggcttcttccccaacctatggaagacacgcagcatggggggctctgcctcgcaccaatgttgcaacccaccacaggaagacggccattctggggccagagggaggttgggatggctgagggagcggagtgcccagcatccagtcctggcccctagcttttttgttttttgttttcttttttaagatagtgtttcactcttgtcacccaggctggcatgcgatggtgagatctcagctcgctgcaacctctgcctcctgggttcaagtgattctcctgcctcagcctcctgggtagctattacaggcgcccgccaccatgccggtataatttttgtatttttagtagaaacggagtttcaccatgttggccaggctggtctcgaactcctgacctcgtgatcccagtattttgggctcacgcctgtaatcccagcactttggggggctgaagcggacagatcgctcaagtccagaagttagagagcagcctgagcaacatagtgagacccccatctctacaaaaagcacacacacataaaattggccaggcgtggtggcacatgcctgtagtccccgctactcagggggctgaagtgggagggtcacttgagcctaggaagtcaaggctgcagtgagccatgatcgcaccactgcactccagcctgggtaacagagtgagaccctgtctccaaaaaaaaataaaaataaaatactgtttcctaactttgaacgtgctaatgccacaagtgggctgggccttctcttaggatatgaactcaatgagttgggtcctatcatagtccccaagttcctagaggggaaaactggaaactgaggccttggttctttgcccaatgtcaatgagtgtagggcaggattcaaactcaggggaactgatgctaaggccccacattgaaccctgaagctgccattattctgatatcaggaaagctaaggcctcccaggtcctaagatctccctagggggttggcgtgtggccatgtccaacactttgccctaggaatcccgcctctgttccatgttttgcaatctgtgactgtccccaaatgttgggatcaccctgaaagcccagaagagggatatctggagtaggggaagagtgacattcttgccgtggaagcttgggcaaatcatttcacctctctgagcctcagtttccccacctgtaaaataaggctgttatctcctggacagagggtcctgaggctccaatgagatgatgtgtgtgtcatgctcaacatcacacaatgcacactgtaggtggctaataagtgtcattctggccaggggccatggctcacacctgtaatcccagtattttgttaggctgaggtgggtggatcacttgagcccagaagcttgagaccagcctgggcaacaaagtgagatcccgtctctacaaaaaatcaaaaaactttggccaggcgcagtggctcatgctttgtaatctcagcacattgagaggccgaggcgagaggattgcttgagtctaggagttcaagacccgccacagcaacatggtgaaaccccatctctacaaaaatacaaaaattaggtggatgtggtggtgggtgcctgtggtctcagctactcgggaagctaaggcggaaggatcacttgagccagggaggtcgatgtgcggtgagtcatgatcatgccactgcaccctagcctgggcaacagagtgagaccctgtctcaatcaatcaatcaatattttttaattaaaaaaatatatagtaagaaaaataaatgtcattctacctccccctaaaggaagaatctgcctgtttaagaagctgggcctaagggactcccacagccaaatttggaaaatttgagcagcaaaaagaagaatgtcagctgagtgtggtggctcatgcctataatcctaacactttgggaggctgaggcaggcagattgcttgagttcaggagttcaagaccagcctgaacaacatggcaaaactccatctccacaaaaaataataaaaaaaatagctgggtgtggtggcacaagcccatagtcccagctatctaggggggctgaggcaggaggatcacttgagcacaggaggtcaaggctgcagtaagccatgactgtgccaccaccctccagcctcgggtgctatggtttggctgtgtccccactcaaatctcatcttgaattgtagctcccataattcccatgtgttctgggagggacccagtgggagataactgaatcatggggacagtttccccaatacagttctcatggtagagaatgagtctcgtgagatctgataattttataaggggttttccttttcacttggttcccattctctcttgtctgccaccatgtaagatgtacctttcaccttctgccatgattgtaaggcctccccagccacgtggaactgtgaatccattaaacctctttttctggctgggcatggtggctcacgtctgtaatcccagtactttgggaggccaaggcaagcggatcacctaaggtcaggagttcaacaccagcctccccaacatggggaaagcccatctctacaaaaatacaaaaattagcaaggcacggtggcaggtgcttgtaatcccagcccaggaggctgaggcagcaaaattgcttgaacctgagaggcagaggttccagtgagctgagattgtgccattgcactccagcctgggtgacagagtgagactccatctcaaaataaataaataaataaataaataaataacaataaacctatttttctttataaattacccagtcgtgggtatgtctttatcagcagcatgaaaacggactaatatactgagtgacagagcaagaccctgtctcaaaaataaattaattaaaaacaaagaaaggaaaaagaagaatgtcaaggtcgtgaaagacaaggaaagaataaaattttcagattggaggagaccaaggagacgtgatgactaaatgtgacgtgggaccctaaaggtgatcccggaccagaaaacaaggccatgagtgggataacttggggaaatccaaataaaatctggagtctggttaacactgatgtccagtgttgattcttagttatgacaaatggatcatagtcttgtaagatgttagcattaggggaagcctatcaaaatctcaatggccttttttgcagaaatggaactgatcttaaaatttatatgaaaacacaaaggactcaggaatcttgaaaaagaagaataacattggaggactcacacttcctaatttcaaaacttactacaaagctacagtaatcaagacagtgtagtaccagcataaggagagacatagaaaccagtgggatagaagtgagagccctgaaatgaatccagacagctaagggcaactgatttgaaataagggtgccaagaccattcaatggggaaagcatagtctttttaacaaacagtgctgagacaactgaataggtacatgcaaaagagtgaagttggtctgtgggtggtggctcacacctgcaatctcaacactttaggaagctgaggtgggaggatcacttgagcccaggaggttgagctgcagtgagctatgatcacactactgcacctcagcctgggtgacagagcaaggtcctatctcaaaaaaaaaaaaaaaaaagagagagagagagagagagagaatgaatttggatccctacctcacaccatataaaaaaattaactcaaaacagatgaaagacctaaatgtaagagctgaaactataaaactcttaaaagaaaacacagagataaatcatgaccttagatttggcaatggtttctttgagatgtggcatcggaagtacaagcagcaaaagaaaaagagaaattggatttcatcaaaattaaaattttttgttgcactaatggacactgtcaggaaagtgaaaagataacccatagtataggagaaaatgtctgcaaattacacatctgatgagggctagtatccagaatttagaaagaactttcacgactcaacaaagataaacaacccaattattaacagtagtggggctgggtgtggtggttacatctgtcatctcaacaccttgggaggctgaggcagagaggatcacttgaggccaggagttcaagaccagcctgggcaacatagtgaaacccctaaaaaccaagtacatacacatgggtgagcatgcacacacactcacacaaatgcacatgcacactcatgtgtagtcacacatgtgtgatacaatcatgcagtcacatatgcatgcaaacaaacactaaatgtaaattacatttttagggtacccattgaaaatctgaatattgcctatgaattagacaatataatttggtgaatgtaattttcttaggtgtgacctaagaaaatggccttgaggtcaggtaaaataatgcctttttttaagtatacattatggtcaagtatttaagagtgaagcactatcatgtttgtaacttgctttcaaatgctgcagccaaaaaatgtgtagagaaatagatggatgcgtgaattggcagatggatggatggatgaagggagggatagagggagaatggatgaagggagagtggatgaatggatggatgaagggtgcatgtatggatggatggatgaagggtggatgaatggatgaagggcggatggatggatggatggatggagggtagataaataggtaagtgtagtgggtggatggatgggtggaggaaagaaagaaaggaggaaaagaaggagggagagagggtagatggatggatggatggatggatgaagggtggatgaagggcagacggaaggatggatggatggatgataaatggataggggtagtgggtggatagatgggtggagaaaggaaggaagggaaggaagaaaggagggagggagagtaaatggatggatggatgatggatggatgaagggaggcgcagagggagggtggatggatggatgaatagatagatggaggatggatggatggatgaagggtggatggatggagggaagatgagtggataaagggtagtaggtggatggatgggtggagggagggaggaagggtgaatgaatggagggagagaggatagatggatggagggatgaagagagggacagatggagggatggagagagagatggagggtggatggagggatgaatgaaaggatataggcaaagcattaatttataaatctaggtgaaagtctcatggttgtttattatattaacatttttcaatttcactctaaatttattaatgtcccccttataaaaagacacccaaacagaagtccccttctgcttgagatcttggggggaaaaggagagcacaaacctttctcctcttctttactaaatttatggcatcaaaacaaccttaaaagattggagtgagcgcccccattcaccaagcaaaacaggttcagaaggatgggtgccaagatgtggggagtggagccccccagttcccccctgccggggccctggcgctagaagaagaggaagaggtccctgcaccatgcccagcctggccccagcatgaacccatcttccctccatgccctgaggttgtgcccgggcccctcatggcagtttggtgggtaggacgcgctggggtttctgagccacctcaaacaggattgagattcacccggggagcaaaatctgagtgacagagccaggtctccccctaatcagaacaacagtctggccagctgagaacacaaggttccttcctgtcccctgaggaggaggccagcaccagcgtccccaccctgcaccactggtttaatggaattacaagaagaacagtgtgttcagccaagctgggcatgatcctgtctgacttctcattcttacaacctctgcaaagggctgttaatcccaggaaacaggcagccttggcgccacgattcctccaagctgaaccccaggggcctcgatatgatcagaaaaggagtgtgagaggtttatgggctggtagggccctgggcgctgtgatggcaactggtttccattaggggtgacatttctgccaaggctggggctatagcttgagccagaggctctgctgggattgcggccaggatgcaaacagcccagccagtgagcctgccaccagtccacaaagttaacagaggggtgatgtatcttaaatatagatgtgtatggccaggcgcggtggctcacgcctgtaatcccaacactttgggaggccgaagagggtggatcacctgaggccaggagttcgagaccaccctggtcaacatggtgaaaccctgtctctactaaaaatacaaaaataattagccaggcatggtggcaggtgcctgtaatcccagctactcgggaggctgaggcaggagaagtgcttgaacccaggagatggaggttgcagtgagccgagattgtgccactgcactccagcctgggagacagagactctgtcaaaaaaaaaaaaaaaaaaaaaaaaaaaatatatatatatatatatatatatatatatgtatatgtgggtatctagatgtctatgaacacacatgtacacagcatatccatatatatgcacatatatacagttgacccttgagaaatacaggtttgaactgcccacaacactgatgtgtggattttcttccacctctgcccaagcaagacagcaggaccccctctcctcttcctcctcctcctcagcctactgaacgtgaagatgacaaggaagaagacctttacaatgatccattcccacttcacgaacagtcaagatattttctcttctttatgattttttttacctgcgcctgccagcgtaagaaaatcttatgattttcttaataatattttccttcctgtagcttacattattgtaagaatacagtatatcatgcatagaaagtacaaaatctgtgttgattgactctggccaatagtaagctatagataaagtttagttaagtttagttttgagacagggtctcgctctgtcacccaggctggagtacagtggcacgatcatgtttcactgcggtcccaatctcccgggctcaagtgatcctcctgcctcagcctcttgagtaattgggactacaggcatgcaccaccacatccggctggggtttttttgtttttgtttttgttttgatagagatgtgatttcaccatgttgcccaggctggtctcaaactcctgggctcaagcaatcctcccgcctcagcctcccaaagtgccaaggttacaggtgtgagccaccacgcccggtcgggaactctactttttgttcaaggtttttataaagttacaactgctcttaaaaaattaagtctattaattaaaagaaaaatacacacacacaccttatgtaatcagaattgcaaaataatagacccaggaaaaatgaatggcagacacggctctaaatttaccttgtctttgcactcagagtgtctgtgtggagaaactcccagggcctctgcactaagggaaggctcaaggcagtggggaatctggccccatagcagcagctctatgtcaggtctgggtgcagtggtgccctggggcagagtggtgatcatcattgtcagccctgggccacagcctaaatgtccataacaaataaatagcaacgagccgggcgtggtggctcacgcctgtaatcccagcattttgggaggccaaggtgggcagatcacttgaggtcagaagttcaagaccagcctggccaacatggtgaaaccccgtctctactagaatacaaagattagccaggcattgtggtgggcacctgtaatcccagctactccagaggctgaggcaggagaatcacttgaaccctggagacggaagttgcagtgagctgagatcgtgccactgcactccagcctggctgacagagtgagactccacctcaaaaacaaaacaaaaaaaaaaagaaagaaaagaaacaaatagtaatgcatgcatgcattctgcagaattctccccttgctggggagataagggatccctgtgtcagctgtagtattaggtcccttagagcaggggtccccaacccccagggccatggaccagtactgattcatggcctgttaggaaccaggtcacacagcaggaggtgagtagtaggctgacaatcaaaacttcatctgtatttacagccgctcgcatcactcatattaccatgtgagctccacctcctgtcacatcagcagtggcagcattagattctctcaggagtgtgaaccctattgtgaactgtgcttgcacgggatctaggttgcatgcccctaatgagaatctcatgcctgatgatctgtcactgtctcccaccacccccagacgggactgtctagttgcaggaaaacaagctcagggctcccactgattctacatgatggtgagttgtatcattgtttcattatatattgcaatgtcataataatagaaatgaagtgcaaaataaacataatgtccttgaatcatcctgaaaccatcccccgtgcccgtgcccccgtctgtggaaaaattgtcttccacaaaaccaatccttggtgccaaaaaggctggctactgctgccttaggggctcactcatgctgtgtcttttttgaggagtctggctttgtcgcccaggctggagtgcagtggtgtgatctcagctcactgcaacctctgcctcccgggttcaagcaattctcctgcctcagcctcccgagtagctgggattacaggcacgcaccaccacactcagctaatttttgtatttttagtagagatggggtttcaccatgctggccaggctggtctcgaaatcctaacctccagtgatccgcctgcctcggcctcccaaaatgctgggattacaggcatgagccacagcacctggctcatgctgctttttggatcccgcatggcccaggaagggtagctcctgaaaatcttacctgcagtgggtgggagggtggctgcagctgcaggtagcactggctgggggagtaccagctgccgagggagaggtagctgggcaggtactgagcccccacaggcttcccgttcagtgccatcaccttggtctgagaagagaagatgcttagatcaacacccgagtgccaagagcagaaagggggtcttggggatgcttctgcttgctctgcccagaagaaacaccctctcatgctccaatatccctttggggaaccccctccccaatcctcagggagtaatagccagttgtccagcccattcttcctagcatcaagaagcaagtgtccagctgggcacagtgactcacacctgtaatcacagcacttcgggaggccgaggcaggtggatcacctgaggccaggagttcgagaccagcctggccaacatggagaaaccccgtctctactgaaaaaatacaaaaattagccaggagtagtggcgcatgcctgtaatcccagctactcaggaggctgaggcacaagaattgcttgaacccaggaggcagaggctgcagtgagctgagatcataccactgcactccaggctggcaacagagcaagactctgactcaaaaaaaaaagaagcaagcatccaagattggtcaaagggtattgggggtcaggcagagtgggtgcatacctataatctcagcattttgggaggcagaggtgtgaggatcacttgggcccaggagttcaagaccagcctgggcaatatagcaagatccagtctctacaaaaaatttgtgcctggagactcagctactaggggaggctgaagcaggaggatcacttgagtccaggagttcaaagctgcaatttagctatgatcacaccattgcactccagcctggacaacagagctagaccgtatctctgaaataattttaaaaagaagttgggccaggcgcgatggctcacgcctgtaatcccaccactttgggaggccaaggtgggcagatcacgaggtcaggagatcgagaccatcctggccaacatggtgaaaccctgtctctactaaaatacaaaaaattagccgggcatggtggccggcaactgtagtcccagctacttgggaggctgaggcaggggaatcacttgaacctgggaggcagaggttgcagtgagctggaatcacgccattgcattccagcctgggcaataagagcaaaactctgtctcaaaaaaaaaaaaaaaaaaaaaaaaaaaaagttggcctgcctctgtctctggctcctgggaagtaggtagactctaaatagggtataaacgggccacaccagaaaggccagttgtgtgattagatggctgggctttgagccacaggttatcagcccatctccagggaagggagagggcaggagattgagattagtcccatggccaatgatttaatcaatcatgcagacgaaatgaggcccccacaaaaaactttggacaccaaagctcaggtgagctttcctgcttagcaatgctcagcttgtggggattacatatcctggttctgtgcagagaacacacaaagcttccaatctgggaattgcccagacctcaccctatgcatctctctctttggttggttctaatttatgtcattttgctatggtaaagctgtaattaaaaggtggtagggtagtggaatttgcagccagtaggtgggaagcacaggtggcccggggacccctggacttgcagctggtgtcagaatttagggtagtcttgtggagagggctgtgcctaccacctgtgaagtgtggcccagctccaggtagctggtgtcagaagttactgcaatctcccacctggtaggggatgggcagggcagatctctggttcctcaaggagtctgagagatgccaggctgtggtcactctcttaaaacaggacagtgggccgggtacggtggctcacacctgtaatcctggcactttgggaggccgaggcaggtggattgcctgaggtcaggagttcaagaccagcttgaccaatatagtgaaaccccatctctactagaaatacaaaaattagctgggcgtggtggggggcgcctgtaatcccagctactcgggaggctgaggcaggataatcgcttgaacctgggaggccgaggttgcagtgagccaagattgcaccactgcactccagcttgggcgacagagcaagactctgtatcaaaaaaaaaaaacaacagaacagtggcccaggtgaccaaacagctgtgctgtgtgttgagcagcaggtccaacacaagaaagcgtgaacccatctggctgtgaatgtcaagtggcaaggcagtggcttcagtggttaaaacctttaggacatggtgcccacagaggacaaagtgaccacagtgtcctcagttcccatctacgtatttactctctgcagggccgccaggtccactgccagttcccaaagccaagggctgggacatcctctccagtccctcctgttcttgcctcccctgatgatgggacactaaggccttctggatctacttcctcaagagctccagtttggagacctctctgtcctcacctcctgtctgcctgcctgggcccgccctgaaccacccccaactaaagactctggagtgatcactgggtatcgaaaatcagatcaggccagacatggcagctcatggcctataatccctatgctttgggaggctgaggtggaaggatggcttgagtccaggagtttgagaccagcctgggcaacatagcaagaccccatctctacagaaaaatttattatttatttatttgcttgtttgtttgtttttgagatggagtctcactctgttgcctaggctggggtgcagtggcgcaatcttggctcgctgcgacttccacctcccgggttcaagcaattctcctgcctcagtctccagagtggctgagattacaggcacctgccacaacacctggctaatttttgtatttttagtagagatggggttttgccatgttggccaggctggtctcaaactcctgacctcaggtgatccatctgccttggcctcccaacgtgctgggattacaagcatgagccactgtgcccagcctctacagaaaaatttaaaaattagctgggtgaggtgctaattacgggcatgcacgtgtaatctcaggtacttgggaggctgactcaggaggatccctttagcccagcagttagaggctgcagtgagctatgatgatgccactgcactgcagcctgggcaacagagcgagaccctgtctcttaaaaaaaaaaaaaaatcagatcactctttcgcctgacactgccttccactgagcacccgtgaggtggcggaaaccaccattggctctctccccaatctctttccaaaatggctcaatgtagttgagcacttgtgagactctgattacagtataatcacggtctgcctctgaacctgcacccaggctgttccacccgcccagaagcagcctggctgacttccccatggtcaggagtccatttggagagatctccttggacaagactcctttggcataactggtccaggcacccttatctctctttgaccttccacctgatcccaggatggctgtgttgtccatcccactgtctagtggaatgtgtactcctgcagggctgggacgggctccaggcccactgatcaggtgcctgcacccagcctgggggaggccccaagtccatacctgctggctgaataacaagggtccacgggactcacccacctccagccacacgtgctgggctgacgtggggatggaggggatttcaaaccccactagtccacgctgggacacaacttcactggtgtagatgttatcctttggtgtcagctctgccttaatctggaccgtcaccccctcagctgggctgccatcggggtaggatagctccacctagaaaaggtcacccaagacacaacagagttaagacggccatgctccccaaactgatctgcagaatcaacgcaatccccactggaatcccagcaggcttctttgtagaaattgacaaactgctcctgaaattcacagggcatcgcaacgagttccaaatcgcaaaaacaatccttaaagggaacaaaaaagaaggactcacaggtccaggagtggtggcgtgtgcctgtggtcccagctactcaagaggcttccaaggcagacatggaagccggatgcagtggctcacacctataatcccatgtgaggccaggagttccagaccagcctgggtaacatagtgagacctcactacaaaaaactttaaaatttcaggtgtggtggcatgcacctatagccccaactattcaggaggctgaggtgggaggatcacttgagtctgggacttcaaggctgcagagagctatgatggtgccactgcactccagcctgagtgactgaatgagaccctgtctcttaagagaaaaaaagttttaaatgaagttgcatccctacctcacaccatatacaaaaataaactcaaatggatcacagacctaaatgtaacagctaaagctataacattcttagaagaaacataagggtagaccttcatgcccttggatttggcaaagaggtcatgaagtacaaattacatgtgctagtcattagtctgatgccataccagggtatggacagttcagtgtgacacttaaacctcacccattcagactggttggagagccagctagaatgaggcagacatagatgttttaaaaggagcacagattgtagcctctgaagaaccctaaaacagccctcagctgtgcaggtatctggtgacggagtgaaccaggattcagcccacatgatcttcattaaccactccctttttttttttttttttttttgagagacagagtcttgctctgttgcccaggctggagtgaagtggcccgatcatagctcactgctgcctctacctcctgggctcgcaatcctcctgcctcatcctcctgatagctgggaccacaggtgtacaataccatgcctggctaattttaaaaaaaaatctgtagagctggggtcttgctctattgcccaggctggtctcaaactcccagtctcaagcaatcctcccaccttggtctcccaaagtgtgagccacaaacgtctggcctatttctttttattttttgtagagactggatctcactatgttgcccaggctggtctcacacttttggcctcaagtggtcctcttgccttggcctcaagtggtcctcttgcctcggcctcccaaagcactgggactacaggcatgagccaccatgcccagcctaaccactcctttcttgaatgcagatggtaggtattttctgtcatatgtgaaacgctctttaccaaatttgtagccttaaacctcttcttcatacacattctgaccccgcacgaggtactttagtttctactcaagctggggccctcaaagccagggacacaggagatgtgtctgtgcatgggatagaggtggctccaacactggcatggagaagagaaaggaggttccaaagcagaacaagagggtcagaactcagtgttaggacagccagccagcatcactcatggacggcaaaagggaactgggtgcagacagatgcagggccagggatgtggcccactttccccttgcatgacactgggctctgttggccttgccccactcctgctgctgcaattggggtgaagatgccccaggtttgtttttgttttttgttttttgtttttttatttgagacgaagtctcactctgtctcccaggctggagtgcagtggtgtgatcttggctcactgcaacctccgcctccaggttcaagcaattatcgtgcctcagcctcctgagtcactggcattacaggtgtccaccatcatgtctggctaatttttgtattttcagtagagacagtatttcaccatgttggccaggttggtcttgaagtcctgacctcaggtcatccgcccacctgggcctcccaaagtgctgggattatagtcatgagccaccgtgcccagcctaccccagtttaacagttaaaataagaataatgactgggtgtagtggctcacatctgcaatcccagcactttgggggtctgaggtaggagatctgcttgagcccaggagttcaagaccagtctggccaacacagcaagatcccatctctacaaaaaattaaaaaattgactaggtgcggtggctcctgtttgcaatctcagcactctgggaggctgaggcaggtggatcacctgaggtcaggtgttcaagaccagcctggccaatgtggtgaaaccccgtctctactaaaaatacaaaaattagtggggtatggtggggcatgcctgtaatcccagctactctggaggctgaggcaggagaatcacttgaacccaggaggcagaggttgcaattagtcgagatcatgccactgcactccagcctgggcgacagagcgagactcttgtctcaaaataaataaataaataaaaatttaaaaataaaaaaatttgctgggcgtggtggctcatgcctgcagtcccagctacccaggatgctgaggcaggcggattgcttgaatccaggatgtcgaggctgtggtgagctatgatctcaccactgcactccagcctgggcgacagaacaaaaccctgtctctaagaagaaaacatatataaggatcatgacatctggacacctcaaaatttaccgtgcataagacttgagtggtgggtgggaggcagaggctcgttcaaaatgtcacatgggtctgcacctgtcagtctcaggaacagaaggtctacctttgcagggctctcaacttaggtcctcaggggataaaatcaacccagtgaagggccaggagtgatggctcacgcctgtaaccccagcactttgggaggccaaggcgggaagttcacttgaggccaggagttcgagaccagcctggccaacatggcgaaaccccgtctctactaaaaatacaaaaattaactgggcttggtagtatgttcctgtaatcccagctacttgggaggctgaggcaggagaatcacttgaacctgggagacggaggttgcagtgagccgagatggagccactgcactccagcctgggcgatggagtgtgactatctctaaaaaaaaaaaaaaaaaaaaagaacccattgaagaaacaggactgccttagagcagttgctttaataaatggctactcagatgtctgtccaagtggaatagagtagattgtcctttcccgtggaggaaaatgtcccctgcccctcacctggaacaccagccctctccactctccgcaaaggttatgtcaggggatccgttttcagctgagtcaccactgcagagctagtggctagtggtggtggtttcacggtggtccttgggcgggaggcagcacagtcacccccaagttaccttccccacgtaggccaggcccggcttgaactgcttcctcgtgtccttggagtaccggatgtccaccagctgcctctgcacgggggtggagtcatcgaacgcgacctgctggctcccgtccacactggtcaccatggcccagatgctgaccctgccccggaagtgctcagggacgtccgctgggatcatgtccctcacgcagatgtcgaagtcccgggagccgaggatctggagggaggaaaaacacagcccgtgctcactcagggttggagtgtctttgagggatgtccctgaaacacacacctgaggtgcaagactcttcagctgcttggagggccaggggtcacttggtggcatacccaatctatgccacgggaccatgcagagggtccctcactggatctggacaacatcccagggaagatggatgttggctccattgggcagaagaggaaagaggctgggtgcggtggctcacgcctgtaatcccagcactttgggaggctgtggcgggcgggtcacttgaggtcaggagttcgatatcagtctagccaacatggcgaaaccccgcctctagtaaaaatgtaaaaaaatagctgggcgtggtgacaggcacctgtaatcccagatacttgggaggctgaggcatgagaatcgcttgaacccaggaggcagaggttgaggtgagcctgaattgtgccactgcactccagcctgggttaagaaaaaaaaaaagaggaaagagattcccatgctgacacaatctcccacagcccaggcaacagagggggcagctgaacctgctcagcctcactctggggcaccagaactccctcattcaattcctatctcaggatcccaccctgggacttggcaaataatcctcattcagaaagagctgtggagtaaattactccgtaaatgagagaactaagtcaaagaccatcagctggtagcctcccaggagaatggctgggattctccaaggtgccagtgtcaggaatgggaaaggtaggggtttatggtttccaatccatggaagagaagcctcagagagcagagagatgggctgggtgtgatggtgcacacctgtaatcccagcactttggaaggccagcagcggcagatcacttgaggtcaggagttcaagaccagcctggccaacatggcaaaaccctgtctctactaaaaatacaaaaattatcccaacacggtggcacatgcctgtaatcacagctacatgggaggctgaggcaggagaattgcctgaacccaggaggcagaggctgcagtgatccaagatcgtgccactgcactccagcctgggagacagagagagactccatctcaataaataaattaattaaattaaattaaattaaagatatctcagacataagagaggggagcccattggagcagatgtgtctcaggtgggaaagggactgagaaggagctttgggtgggaggtggggaggagccggtgctgaaaggcttaatgtccgggcacctacaaagggatgggaatctccaggaaggtgggtgtctgttgtactgtagcccactcacaatgtaacattatgctgaaagaccaaaaaaggttacaaaactttaaacaggtgggaatataaaatagtgcagccacattgaccatttggcagttcctcaaaaggtcacacatagtgttaccctctgacctagcaattccgctcctaggaaagaacccaagagaaacaaaaatgtaggtccacagaaaaacttgcacagggatgttcatagtagcatgagacataatagccaaaaagcagaaacaacccaaatgtccaccagcggatgaagggataaacacattgtggtccatctgtaccagggaatatgatgcagccataaaaaaggaatgaagcattgatcatgctacgatgtagacaaacatcaaaaacatgatgctgagtgagagaagccagacacaaaaggacatatagcatatgattcattcacagaaatgtccagaacaggcaaatctacagagacagaaaacagatagtagttgccagagacaggaggagggaaatgaggattctctgcaaaaggacatgaaggatgtatggaaggatggtggaacaattctaaaattggataacagccatggttgcacaactctgcaactatatgaaaaccatcaagctgtggccaggcgcagtggctcacgcctgtaatcccagcactttgggaggccgaggcaggtggatcacgacgtcaggagatcgagaccatcctagctaatacagtgaaaccccgtctctactaaaaatacaaaaaaaaaaattagccgggtgttgtggtgggcacctatagtcccagctactggggaggctgaggcaggagaatggcatgaacccaggaggcggagcttgcagtgagccgagatcacgccattgcactccagcctgggcaacagagcaagactccatctccaaaaaaaaaaaaaaagaaaagaaaaccatcaagctgtacactctacatgggtgaattgtatgctatgtgaatgatatctcaataaaattgtttatgtttttattttattttagagatgggatctcactatgttgcccaggctggccttgaactcctgagctcaagagatcttcctgcctctaccttccaaatattaagagctgggactccaggcaataaaattagtgtttattagtgtttttttgttttttgtttgttttttgagatggagtctcactttgtcgcccaggccatggtggtcaggctggtctcgaattcatggcctcaagtgatccgcccgccttggcctcccaaagtgctgggattacgggtgtgagccaccatgcccagccaaattggtgtttttttaactttacttacaataacctgtgaggaaacacatcaaaatatcgatagtggtcatgtccacctattggagaacaagttatctttattttcttcctttttatattttctaaagtctctatattcagcctgcaggaattttatcatcagaaaaatccctgccatataactgttttagaaagtaaaacagcggtggctcacacttgtcatcccagcacttttgggggcaaaggcgagaggatcgcttgagcccaggagttcaagacaagcctgggcaacatagtgagatcctgtctctattcaaaaactttttaaaggcagtaaataaaataataacaataagagaaagtaaaataaaatgtgtgctggtggaggtgaacctgggggttgggtcagggggtagaaggggtccctgtttctcaccttggttgttctgaggacagggcgtcccacctcgtggctgtagtaccctacaccattaacagtcatgttgatcattaaggcaccagccacaggtttcccaaaggtatacctggaacaaaaggataaagcatgctcaatttcacagccaagatggcagggagggcccagcctcaggaaggccaggttgacatagtgtggccactagtacagtgatggatgcagctccctccacaccctgcatcctgtcctgacagccctccctgcagcctggaatcgggacagaagatgccaaggccctccgatcctctgcaccaagcctccagatggacagaaaaagagaccaagggtcagagaggaactctggaactgagaaggctaggttggtgccacctctggagcagagtagtgcagaggcatgagcgactgagaggcacctgagcctaagcgccctattaagctcgactttgaaccaaggaccgaacttctctgagcctgtttcctcacccagagaatgggactcaaactaccctctcaggggtgatagtgaaacttaaatgtctgtatgtcactcctgatgcagagggaatgctggtggatggggaacaggagcaaaatgagagagtgcaggctgggcatggtggcttatgcctgtaatcccagcactttgggaggccaaggtgggcagatcacttgaggtcaggagttcgagaccagcctggccaacatggtgaaactctgtctctactaaaaatacaaaaattagttgggtgtggtggcacatgcttgtgatcccagctactaggagaagctgaggcaggagaatcaattgagcccggtaggcagaggttgcagagagctgagactgtcactacactccagcctgggcgacagagtaagactccgtctgaaaaaaaaaaaaaaaaaaaaaaaacaaggatcaacccctctcgggtcagcacactggcgggggtgctgttggatgccagggaggcctgcagagggcggggagcagccttgggggagaggggaacatggtggggttgggagggtcacaccctggggggtagggcattctttggggaggggagacccttggggagggaagaacttagagtggaagggcaggacttgaggaaggaatacacagcgggagaggggcatgctttggagagacaggggcgtgctcataggggtgaggacaccagcatggaaacaaagacaggcagtgggtagagtgcaagagactcatgtggcagggagacaccgagtactagggagggagcggggcacagggcacccttgtgggagcagggaggccatggaagaagtgtctgcctgtaggaggagggggaagcccggttgttgggggagatggaaggggagggcagaggaggggcccagggggaggaagatgctctagggaaaggggtacactccagggagggggtgcccccaggggaggggcacgggaaaggatgatgctctagcgggtggccacatcctggggaggggaacccacaggggaggagcccagcagggagggagatactttagagggaggaggacaccccagggaggaggcgcccacaggggaggagcctggtggggagggagatactctagggggaggggcacctcctgaggagggggcgcctactggagagagtcacaggaagggagatgcactaggggaggggcacaccccagggaggagggaaccaggaagggaggggcacacccatgtgggagggagggaggcagcagaggaggggaacgaccttgagggagcagcgtgatggttggggaaggggaagggcccccccagtgtgccccaggggtccctctttctcacctggcccgcacagtgcctgtctcacaggcgtccaggtcttggatataccggggcgggtcaatcagaagctcaaacttgggcaacactgaagaaagcaagcagagaggaggggctggcttctgtccctaaggtggcctcaggagccctgacaccggtgcaaggtgtctgaggaccacagcacctggccaccaccgaggttgacactgtacccatccacaccactctgctgagcagccctggggattttgtgggctgcatctatttctcatctttgggggactaggaccccattttcctcaaggggcctcccctgtcacttttagaccacgtgcttagagtgtggcggattccagcctatcccagggtggacacgaggccaggaggctcctcctagcccctgtgtctgtgcatgggatagaggtggccctgggagccaacaaggggcatccccagggtgactgcaacagagagctgatttctccatttgcttctggactcagccctgggagtatcaagccatcttgtcaccaggggcggaggtgacaccctggagcagccggtaaaccagaaagaatcgggtcctgagagaactcttgtaggagcctaagaatcttttcgttctttcttttcttttcttttcttttctttttttttttgagacagattgtcactgtgtttcccaggttggtgtgcagtggcacgatcttggctcactgcaacctcctcctcctggttcaagcaattctcctgcctcagcctcccaagtagctgggactgcaggcacatgccaccacgcctggctaatttttgtatttttagtagagatggggtttcaccatgttggccagcctggtcttgaactcctgacctctagtgatctacccacctcagcctcccaaagtgctgggattacagacgttagctgccatgcctggccacctttttttttttctgagacagggtctcactttgtcacccaaactggagaatagtggtgcaatcacagttcactgcagccttgatctcctgggctcaagcaatcctcccgcctcagcttcccgagtagcggggactacaggcacgtgccaccatgtccagataattgttttaaagttttatacagacagggactatgttgtccaggctggtctcaaactcctggcctcaagcgatcctccagcctcagcttcccaaagtgttgggattacaggtgtgagccaccaccatgcctggcctacaatacttttttctataaaaggcaagagtccactttgggaggctgaggcggaaggattgcttgagaccaggagttctagaccagcctgggcaacatgacgaaaccctgtctctactaatacaaaaattaaccaggtgtggtggctcacacttgtagtcccagcaactcaggaggctgaggagggaggatcacttgaacttgggaagtcaaggcttcagtgagccaagatcgcaccactgcactccagcctgggtgatgggtgtgaaaccctgcctcaaaaaaaaaaaaaaagtaagagtgtaggaccatcccctgaaactatacccagccatcatgagccctcagtaaacggggactcatgtcatcctccacctcttcactgccatcttcaccagtttccttttctttttctttttttttttgagacagagtctcgccctgtcgcccaggctggagcgcagtagtgcgatcttggctcactgcaacctctgcctcccggttcaagtgatactcctgcctcagcctcccaagtagctgggaccacaggtgcgcgccaccacgcccggctaatttttgtatttttagtagacacgaggtttcgccatgttggccaggctggtctcaaactcctgacctcaagtgatccgcccacctgggcctccgaaagtgctgggattacaggcgagagcccttgcacccggccttcttcaccagtttctaaggtttctcccagatctgaaatcccaagaccctgagattctccaacttaccatacttctgaacttcaaaagacttgttgtacgcgtggccttgcatttcaacaaaaatgaaccattctcccaacacaggctggtcggacaaggggaagctcatgttggtgatgcctgtgtgaagagagagggcaagggctttttcagagagccacagacacggtgaggtacgggaagagggagccaggaccctgctccttctccttccctgagcagccccccaggagaactggagaccacagagaagctggcggggtctgtgcagagcagcaccctgtaggatcaggccagcggagcaggtttgacaccccggcgggcttcgaagggatgcaggaagggactggacccgcggttcccgggacagccttgcagccagggccaggggcaggcagtgagctggacaaacgagggaaatgagccagcccggctcattcactccatcccccgccacccgagtcatttccagcctgggcactactgacacctggggccacgtggctctctggggtggaggtgtcctgtgagctgtaggatgctgagcagcacccctggcctccacccaacagatgccagtagtaccaatgccccccacaatataacgacctaaaaaagtcccccagatactgccaatatcgcccctagggggcaaaatcacccctgggtggaaatcccagagagagagagagacagacagagagagagagagagagaaacagacaagacagacagggtctcctgccaggatagggtttctcagcctcagcactactgacatttagggccagatcattcattgtggtgtgggggcatcctgtaaactgaggggtgctgaccatcatccctggcctccactcaccaaaggtcagtagtaccaatgccctctacaatataacaacctaaaaaagtcccccagacattgccaatatcgcccctagggggcaaagtcaccccttggtggaaatcccagagcactgaggggtgctgagcatcttccctggcctccactcaccagatgccagttgcaccccttgtcctccacaaaagtcctgacaagccaaaatgtccccagacattgccatgtcccctgggggcagaatcgcctgtccgaccccccacccctccatgagaaccaccccccaactgaactagagcacgcacacactttagaacagagcactctctccccaaacatccccccagaaacaccatcagccgctgacatgggagctgtcatttgctttgcgcctgtgcctctgagccccgtccgcagctgttttcactgggagccatggaggagttggaaagggcacattgactctaggcagtgccaggggatcttccactcctgagtgtgacacgctccactcgtccccaatgatcatatggggagggccatacagggaagggacagggagagtggttcccctgggtctcacgacagaaccgaaaacccatagcggcgcccacggcttctctcaatcacattggagtcagaagatgtgatggctaaaatggctttttccccctcatattcaggcaaagtgggcctttgatggttacaggacattcggggatgtgtgtcctgagcacgtgttttgtaaggggtctgtggccaactttgccaagtgctccctgagagaggggcacagtcaccctggttgagaatcatgggtctacacacatcccaaagggttttttttttatttttttgagacagagtcttgctcttttgcccaggctggagtgcagtggcatgatctcagctcatgcaaccttcactcccgggttcaagagattcttgtgcctcagcttcctgagtagctgggactttaggcacccgccaccatgtccagctaattttgtatttttagtagagacagggtttccccatgttggccaggctggtcttgaactcctgacctcaggtgatctgcccgcctcagcctcccaaagtgctggcattacaggtgtgagccaccaagccaggcctcaaagggtttttttaaacaggaggttgacctcttccccaactctgtgctcttaagatcaagtcagcctaggcaacatcttgagaccctgtctctaccaaaaatttaaaaaattagctgggcttggtggcacgcgcctgtggtcccacctacttgggaggctgaggtgggaggatcacttgaacccaagaggtagaggctgcagtgagctatgatcacaccactgcactccagcctaggtgacagaatgagagagaacctgcctcttgagaaaaaaaaaaaaaactttttaaaaaaagatcaaatccattctcttccctggctcttgccagtgtcacccctgctctcagcactcaacatctctctcctgtcccccatctccaacctcactaccctagacatccacagcccttcccataagttgactccctgcctgggagatgcttcctggcccccttgctttgcctggctgtcccccgttccttctttgttgctgaaaaggatcctccttcaggcagccttccaggattgcctctgccaccccgggctgggatagagccccatttgccatctctgagttttgaacttctccttcctagcactcatcacaactgacattatccaggctgtttagttcatgtttgcttcccccattgggttgaaagctcaccccatggcagtatctatgtggcgcccaacaaatagctgctgatacaaagacagcaatcaagggaacgagagggagtaaagaaggcagacagggaagatggaacagaagaaaagaggctgaggccaggcacggtggctcatgcctgtaatcccagcacttttccgaggccgaggcgggcggatcacctgagtttgggagttcaagaccagcctggccaacatggtgaaaccctgtgtctactaaaaatacaaaaattagccaggcctggtggcacgtgcctgtaatcccagctacttgggaagctgaggcaggagaatggcttgaacccgggaggcggaggtggcagtgagccgacatcgtgccactgcactccagtctgggtgacaatagcaagactgtattttaaaaaaaaagaagaagaagaaaagaaaaaggagaaggaggaagaagaagaaagaagaaggaggaaggaggaagaagaagcaggaggagagggggaggaggaggaggaaagaagaaggaagatcgaagaagaaggaggaggaggagggagaataagacgaagagaaggagaagaagaaagaacaagaaagaaggaagatgaagaagaagaaaagaggctgagacccaaggcaggagacagaaggaggaagggtcaccaacagacccccgtgatcctgcctgtggctctactgttaccccatttctggacagcctgggtgtgtgcatggccatccccagactccccacaccctacctatcccctgccctctcctggggcatcacacccctcacaggcaaagcaaagtggggtatgtcaattacacagtcttcctagtcataggaaaagaaaagaaaaaagcaaagtcctttctgacttctagctggaaaagaaatatctcatgcaatggggatgataaaatctgcaacctatagcaggaagaagctgggagcaggccgggcgtggtggctcacgcctgtaatcccaccactttgggaggacaaggcgggtggatcacctgagaggtcaggagttggagaccagcctggccaaatggtgaaaccccatctctactaaaaatacaaaaataagccaggcgtggtgccatgcacctgtaatcccagctactcggtaggctgaggcaggagacgctcttgaacccgggaggcagaggttgcagtgagctgagattgtgccactgcactccagcctgggtgacagagagagactctgtctcaaaaaataaaaaacaaggtgagagcaggtgccccagtattccacaaaggtcttgagttctgagcaggagccccgcctgagtcctgggcatagagaaacgtgggcagagggtccaaatccacagggaaggtgctgtgggctgggctgaggctcccagatccaaacccatggcattgtcacctcccaggtgggtacctgccctccgctcctccttggtcccctccagctggagcagcagtgggggtacattagcggtgggccctggacagagcatattctgttttcctggaaggtttatcacatctgcagcccccaagccgcagaggaagaaacttaccgcagcagaacggctttaagtgtctccactctatcatccgagagcctcgggggtcctgttggtggtggagggggacagacacacggagtgaactcaggctagcctagcatgtgcccaatgtaaggattttcccagtcctctctcttgggcatgtcaaccatgcagcgaaggtcccaagattaatcattaaccccggggcaaaaaaaaagctctggatagagaaggatttgaaaagcagaaggggatgggctgggcctacctcctcatttagggagccgtgtacaaacctagaaatggacgtggctgggtgtggtggctcacacctgtaatcccagcagtttgggaggccaaggtgggcggatcacctgaggtcaggagtttgagaccagcctggccaacatggtgaaacccccatttccactaaaaaagatacaaaaaaaaattagctgggtgtggtgccatacgcctgtagtctcagctactcgggaggctgaggaaggagaatcgcttgaacccgggaggcagaggttgcagtgagccaagatcagcaccactgcaatccagcctgggtgatagagcgagactccatttcaaaaaaaaaaaggaaacggacagacacacacacagcccatcccagggcggacccagggaccaggatagaagaggccaggtcccagccttgtaaggcacagcggctcaacccagaaggcagacagtgagcgaagacagaccagatcttgcagaaggtgggctacccgggccccaagtccaagccgaggaaggacagaggccactcaccaggatgtaggcttccagctgtaatgaagacacagatgcagtgagcaaatcttccagcaaaccccaaaccctttcaacatgctcatgcatggcctcggtccccgggacaggcagtcgctgttatgggttaaacagtgtccccctagattacatccgttgaatcctaaccccaagtagggtctttagaaagactcattacaggtggctcatgcctgtaatcccagcactttgggaggccaaggcgggtggatcacgaggtcaggagattgagaccaccctggctaacaccgtgaaatcccgtctctacaaaaaatagaaaaaattagccgggcatggtcgtgggtgcctgtagtcccagctactcgggaggctgaggcaggagaatggcatgaacccaggaggcagagcttgcagtgagcggagattgcgccactgcactccagcctgggtgacacagcgagactccgtctcaaaaaaaaaaaaaagaaatggggaaaccaggcaggcactacttgaaccactggaccctgttaatgtccccagcaacacgacaaacccatgctgggtgcctcctgatacaaggcaccggggaggatccagtattgcttctgtggatcctgcccgagattcacagactgaacttggtcacaaggaaccaggagaccatcctaccaaggggcgttctgcaaaacaactgcctggacttgccaaaaatgtcaatgtcatggaagacacagaaaggcagtgaggaactaattcaaattaaaggagaccaagagacatgatgatcaaatgcaacaaatgacccacgatcagatcctggaccagcaaagaaacatgctataaaggttactattggaacaacatggattttatattagatattattattgtgtcaatgtcaaaattattttcctcctcttttttttttggtttttcgttttttgtagagacagggttgtgctttgctgcccgggctggagttcaagtggcacaatcacagctcattgcagcctcgaactcctgggctcaagagatcctcctgactcagcttcccaagtagctgggactactggcacatgccaccatgctcaactaatttttattattttaattttttgtcaagacagtttcgctatgttgcccagaatggtctcggactcctggccacagcgatcttcctgcctcagcctcccgaagtgctgggattacagatgtgagacactgtgcccagcctcaaaatttttaaatgtgatgatcctccttgagttgtataagagaacgtccttgctcttaaaggatacaggccaagtgttcagggccagagaggcacagtatctgtaagttattctcacattatttaccattaaaataattttgtaagtatatatacatatacagacagagagagagcgctagaaagaaagcacataaatatagccaggtgcagtggctcacacctgtaatcctagcactttaggaggctgaggcgggtgtatcacctgaggtcaggagtttgaaaccagcctggccaacatggtgaaaccccatctctactaaaaatacaaaaatcagctgggcatggtggcacacacctgtaatcccaactactcaggaggctaaggcaggagaatcgcttgaacccgggaggcagaggtcgcagtgagccaagatcgcaccactgcacttcagcttgggtgacagagcaagactccatctcaaaaaaaaaacagaaaaaaaaatcagccgggcgtggtggtgggcacctataatcccggctactcgggaggctaaggcaagagaatcacttagaacccaggaagcagaggttgtagtgagccgagatagtgccactgcactccagcattggcaatagagcgagagactcggtcttggggaaaaaaaaaaaattaagcaacagtccagggctacctaaagccctcaaaggcattccttgttgaggggcagtgggccaggcacgcccaccagccttcctctgtcacaaagaactccctggggttctccgggggacatgaaacaaccatgaaagaaaatagaaaagagaagttctggagagaaagacccgtttccgatggtggccctggccaggtagtcccaagtgggtgcactccgggcccgcggttttagaagctgatctcaccttctcgttgacaggcctcagatttggagagacggtgaagatgcttatgagcactagaagaaagaagagaggcgtgtgacacctccagaccatggccggccctccctgcatccatgctggccactcacctcggtgctggggtctgtacacaggcttgtccgtctggatgaatacagaagcgccccggccgtccacggtcaccgaggtctggttgtgaaagaggggcccctcctccgcctgccagccgcggccccacactttcagaagcgcttggccccggaggcccgtgggcacctgcaggcagaggaaggagctttgggacaagaattcaccctggaatgggccaagatactggggaaggagtttggaggcctggaacagggggaactcaccccaggagtgactgtgccccagggggacacttggcagtttctggagatgttttggggtgtcatagctttgggggtggggattgctactgtcacttgagaggggaatagagaggctgctcaacatcttacagagcacaggacacccccgcccttggcaaactgccccaaatatctttttttttggagacaaggcttactctgtcgcccaggctggagtgtagtggcactatctcagctcattgcaacctctgtctcccagctcaaatgattctcccacctcagcctcctgagtagatgggattacaggtgtgtgtcaccatgcctggctaatttttatgtttttagtagaaacggggtttcaccatgttggccaggctggtcttgaactcctgggctcaagcaatccatctgcctcagcctcccaaagtactgggattataggcgtgagccattgcacccggccatatcttttttctttctttctttctttctttctttttttttttttttcaggcagggtttatctctgttgcccaggctggagtgcagtggtgcaattatggctcactgcggccttggcctgctgggcgcaagcaatcctcccatctcagcctcccaaagagctgggactacaggcatgcaccaccaagccaggcttattttgtttatttttggtagaaacaaggtctcactctattgcccaggctggtctcaaactcctgggctcaagcgatcctcccacctcagcctcagattacagacgtgagccactgtgccaagcctgccccagctttcagccatgctgaggctgagaaacactggtctagttatggagccttctcttctgactcaacagagttgcaaagctgttttctgtcatcatcactggagagttacaagaactgtctcccttcttgccaagtgaattcacagcctgtgagcggtggaaggagacctggatcccttgatatacatatgtacatgtccagatatatctatcatgtatatgtgtctgtgtttgcctcactctaaaatcgcagcacaggctgagcgcaatggctcacacctgtaatcccagcactttggggaggctggggtgggcggatcacctgaggtcaggagttcaagaccagcctggccaacatggcaaaaccccatctctactaagtacaaaaattagccagctgtggtggtgggcacctgtaatcccagctactcgggaggctgaggcaggagaattgcttgaacccaggaggcagaggttgcattgagcccagatcgcaacattgcactccaacctgggtgacaagagtgaaactccatctccaaaaaaaataaataaacaaataatacaaataaagtcacagcacaagccaggcgcgatggctcacacctgtaatcccagcacttcgggaggccgaggtgggcagatggcttgaggccagaagttcaagaccagcccagccaacatggtgaaaccctgtctctacaaaaaatacaaaaaaaattagccaggtgtgtgtcaggcacctgtagttccagctactctggaggctgaggcacaccaatcacttgaacctgggaggcagaggttgccatgagctgagatcacaccactgaactccagcctggatgacagagcgagactccgcctcaaaaaataaaataaaataaaataaaataaaataaaaatcacaacacatatatagtgcatgactccattgatctgaattgtccagaaaaggcaatccacagagacaggaatcagatgggtggttgctaggggctgggagaagggagtggggagtgactactgatggggacagggtcttcttttgcggggataaaaatgttctggaactagatgggggggcattgcacaaccctgtcaatgtagtaaatgccacggaattatatgttttagaatggttagatggcttttttgttggtttggtttgtgtttttgccacacagatgggagaaaaaaaaaaaccacttcagtcttcaggatggagcctacactacacaattccttccttccttccttccttcactacacattccctccctccctctctccctccctctctccctcccttcctttctttcttccttccttccatccttcctacactacacattccttccctccctccctccctccatccctcccttctttctttctttctctttctctttctttcttttgtttttagagacaatatcttgctctgtcgccagactggagtccaatggtgcgatcagagctcactacagcctcaaactcctgggctcatgcgatcctcctgcctcagcctactgagaagccaggactgcaggcatgcaccaccatgcccagctaatttattttattttattttttggtagagatggggtctcactatgttgcccaggctgggctcaaactcctgggctcatgtgatcctcccgactcagcctcccaaagtgctgggattacaggtgtgagccatggcacctggccgtcctcttatttttttttaagcagatgggcagaacgccctggcatgtgagtcatgcactataaaagctcctttcatgcttaaaacaaacaaaagtaatgcctcctgtattagtctgttttcacactggtgataaagacatacccgagactgggtaatttataaagaaaaagaggtttaatggactcacagtttcacgtggctggggaggtctcacaatcatggcgaaaggtgaaaggcacgtcttacatggtggcaggcaagagagaatgagagccaagcaaaaaggggtttccccttataaaatcatcagctcttgtgagacttattcattaccatgagaacagtatgggggaaaccaccccatgattcaattatctccctctgggtccctcccacaacgtgtggaaattatgggagctacaattcaagatgagatttaggtggggacacaaccaaaccatattacctccctctatgtgaccggtatttgatgatagttaccctctcagccatccctgggcacccagcaggtggacattacctccaagcagatcacctggggagctatgtgcacccacctgttcctaaaaccacccaaatggctgggcacagtggctcacgcctgtcatcccagcactttgggaggctgaggtgggcagatcacctgaggtcaggagttcgggaccagcctggccaacatggcgaagccccgtctctactgaaaatacaaaaattagccaggtgtgatggcaggcgcctatagtcccagcgactcaggaggctgaggcagcagaatcgcttgaacccagaaggcagaggttgcagtgagctgagatggtacagctgcactccagcctaggtgacagagtgagactccatctcaaaaaataaaaaataaaaaaaatgtaaaaataaaactatccaactgtggggtgttcctcttctgaggacccctatgtcagcatctactcatgtggtccctcaaggggtggatggaccctggtgaccatcacggggaacaatctaccagattatctgactgatcatcacagttctgcactgtcatgaccattgtgtgggtgaggtcggggtgcactaggacccccgctctctgaagccacacggggtccgtcccagccctctctccagccacccacctcctgtctgctctgaacagcctcagagggacctctcctacctgccacccgcaggaccagccttctggacctgtgaggtctcttctgactgcagtttccccgtcaagaccaaccaaagcaataaacctcacccactactccaatcccaaaatcctcacctggccctgtttctggaaatatctcaacactggccagaggctgaagagggaggaaaggtcccggccacccaagagcagggcaaggatgggcaggagggagataccggaggtgctgaggaccgtatgctggagggacagggaggctggcgggcaagagactatgctgagcacataaagggggccgaccccaaacggcagcccctagagcttcacaccttcccagggaagaggatgcctcccacagggagagaaggcaagaaggacctccagccttctttccgtgtttaaagacaggctcttgctctgttgcccagactagagtgctgtggtgcgatcacgtctcactgcaacctcgatctcctggactcaagcaatcctcctaccttggcctactgagtggctgggactacaggtgcaggccaccatgcccggctaattttttattttcagtttgtagagacaggggacaggctctcaactatgttgcccaggctggtctccaactcctggcctcaagcgatcctccagtttcagcctcccaagtagctaggattacaggcaccagtcactgtgcctggccaaatgctaaggatcttaagcatctttcttgggaatctcaagtctagtcttaagagcccttggcccctctcccagaattatacaaccctttgttagtctctcttacaaattcccagcatctgtgctgtgaagagtgtcttctaacgtgtggtggccagggactgcacatcatcttaacacctgctccagggaaatggcttcctgactcataagaaagcagatctaggctgggtgcagtggctcacacctgtaatgccagcactttgggaggctgaggcaggtggatcacttgaggtcaggagtttgagaccacagtagccaacatggtgaaaccccacctctattgaaaatacaaaaattagctgggcatggtgggggcgtctgcagtcccagctactcaggaggctgaggcaggaaaatcacttgaacccaggaggcagaggttgcagtgagctgagatcgtgccactgcactccaccctgggcgacagagcaagactctgtctccaaaaagagagaaagagagagaaaaatctaatcacacaaaggaaaggcaggagagagagagaggaaggaagggaggagggaggaaaagaaatccaatcacaggaagccaggaaagggagttctagggtctttttttttttttcttttttccttatgcttctgtaggcattgaagccctagggcagggaccctcaacccctgggccacagactggtaccagtcaatggcctgttaggaatggggctacacagcaggaggtgagcagtgggtgagcaaatgaaccttcatctgtatttacagccgctccccatcactcacattactgcctaagctccgcctcccatcagatcagtggtggcattagattctcataggagtgtgaaccctattgtgaactgtgcatgggaggggtctagattgcatgctctttatgacaatctaatgcctgatgatctgttactgtctcacatcacccccaggtgggaccatctagttgaaggaaaacaagctcagggcttgcactgtttcttcagttatggtgagttatatcattatttcgttatatattacagtgtaataataatagaaataaagcacacaataaatggaatgcccttgaatcatcctgaaaccatttcttctgctccctggtccgtggaaaaaactgtcttccatgaaactggtccctggtgccaaaaaggttggggactgctgctctagggttttggttcagggtttcctgaatgtggacttctggggccacatccttctttgctgtaagggatcctgcgcattgtaagatgttgagttgcagctgtggcctccacccaccagatgccagtagcacctggcaccgcccagccccaacccagctgtgacaaccaaaaatgtctccaaactttacgaaatgtgccctgtagggcaaaagcccccttgagtgagaactgctgccttagagaaagggttctatcatcaaatgtaatggaggggccaggtgctgtggctcacgcctgtaatcccaacactttgggagggctgaggtgggcagatcaactgaggtcaggagtttgagaccagcctggccaacatgatgaaaccccatctctattaaaaatacaaaaaaattagctgggcacggtggtgcacacctgtaatcccagctactggggaggctgaggcaggagaatcacttgaacccaggaagcggaggttgcagtgagccaagattgcatcactgcactccagcctgggagaaaaagcaagactgcttaaaaaaaaaaaaaaaaagtaaggcaggaagaccactgtcctgcagcaaataggcactagtggtatacctcatacaaaaggaactatctcagcctccattctgatcaatggagatgggcgccttataatttaaaataattctcaatttagcccattcattcgtagactcctttgagcatgtggtaaaagttaaggaatagctaaccccccaaatgccgcaattccagggcttacataatatctgaaatccaaggactccagtttgaaaacccatgtcataaaattatttacatagtttggtacatataataatttaaaaataacaatattcaatgtctgagaggcagtggagaaatctgatccctaatgtactgcaggtggttccatgaacaggtactgctgtgtattccaggacacagcaagacccagtgagaggcttgggtcctgctggtaattcttcaatttggctgtttagcctaaagaaggcatccagaatgctaatatggctttacatacaaacattctggcgacttaaggattacagtatcaaaacactgaaaacagcccaggcagggtggctcatgcctgtaatctcagcactttgggaggccaaggtgggtggatcacttgaggtcaggagtttcagaccagtctggccaacatggtaaaaccccatctctactaaaaatacacacacacacacacacacacacacacacacacacacaaaattagccagtcttgatggtgcatgcctgaggtcccagctacttgggaggctggggcacgagaatcgcttgaaaccagggtcagaggttgcagtgagctgagattgtaccattgcactccagcctgggagacagagtgagacttcatctcaaaaaaaaaaaagaaaaaaaaaaccactgaaacaatctagaaaaaatctagctgggggcttagcaaactgatatttaagaggggtgcaataggatgctgcttacaatgaaatggaaattccaattacagagacttggaaacatggaagttgtttacaacagtgtgataagagggactaggaaacaccacggtgttttgttttcttttgttatgttttgttttgttttgttttttgagacggagtttcactctgttgcccaggctggagtgaagtggtgagatcttggctcactgcaacctccgtcccatgggttgaggcaattctcctgcctcagcccccgagtagctgggattacaggtgtgcgccaccatgcccagttaacttttgtatttttagtagagatggggttttgccatgttgaccaggctggtctcaaattcctgacctcaggtgatccaccctcctcggcctcccagagtgctaggattacaggcatgagccactgcgcccggccagtggtgtgtgtcctttaactgaaactatgaaaagaaaatgtatgtgcatgaacaagaatgtgtggaaaacatgaaaaagtgaaaagtatgaaaactggattatcggtggatttctccttttctaaatttcattattctctcatttttttttaaatagggcctcactctgttgcccaggctggagtgcagtggtgcgatcatagttcactgcagcctcaacctcccagtctcaagcgatcctcctacctcagcctcccaagtggttgtgagaacaggcgtgaaccaccatgcctagctaatggataatttttgtattttttttttttgtagagacaggattttaccatgttttccaggctggccttgaattcctgggctccagagatcaacccacctcagcctcgcaaagtgctgggattacagatgtgagcatggcacccagcctcattattcattttttacatctcttttttaaaaatgatttttctcacaacacatgcaatttctcttattccatcccaattcaattcttttttttttttcttttctttttttttttttttttggtgagacggagatttactcttgttgcccaggctggagtgcaatggtgcaatctcggctcacagcatcctccgcctcccaggttcaagcgattctcctgcctcagcctcccgagtagctgggattacaggcatgtgccaccacgcctggctaattttgtatttttagtagagatgcggtttcaccatgttgcccaggctgatctcgaactcctgacctcaggtgatccacccacctcggccttccaaagtgctgggattacatgtgtgagccaccacgcctggcccaattcaattctttatttccaaggtcaggtttatgattttaaaaatcaacggcttaccttgagtttgattgtccctttatctaaaaatgaaaataaaatgaaaaaagttaaatcaagagctgtgttgccctgcctccctgagctgcagcctcacaaaccacaaactttcttaacccaaaggggtttcatgtggacaaacacaccctgggtcatgctggcctggactgggccaggctaggactggcagaagccagaggtttcctccaagctggcacaagctgaaggccagagggaatggacaaagctgagctattcagggcaaagctggcctgcctaagtacttgatttacttcacccctggctcctgtccaaactaagctgtgaggggagtaatgggaaaacaccaggggagaggaacaaggagaagggtggagagaaagaagaggggactgaggtccccagtggacctgactgttctcccatcacctctctctgctacccacactaaatcatttgtgctactgtactaggtttctggcctccaggactcaattaggtatctattatttttgcctcccagcaaccattatcccatttcctgctaacagatcctcaatttccttggacaagctatctgcccagcacacaacgcacgtggctcccaagctctccatccaccttcctgggactctgagccaatctgcataggccttccccctggtcacagtgattggttcagggctgagcacatgacccaaaatgaaccaatcagcataggccttcccctctggtcatagtgattggctcagggttgagcacatgaaccaagataggccaatcagagggaatcctgggactttatccagccatcttgggagactggtgcttcccctgatcttaaggagagacctggttgcatcaagaggtagggggagaagctggccagcaataccagtggactttctttctaggtatgagagaccacaaactgttgcagaagccaactgggttgggtttcagttggctagccacccaagtcaggagtgcctggttcttctaggactagaagggcttctagaaggttctagaagcttccacatttccaccttctctggccacacctccctaagagacaagtgctgcttcactggccttggagcccctggccttctctgtgtctcctgtggctacatcattctcggcatgaggaatgagtctacctcccctgggagattacagctttctgagccagggatctgcattcactatcttgaccaggaggctgaggctgttgctgtctgcatttgaccaaggagtgaaggggagagactggctgagggcctgagctgcacttagtaacaggcctgtgagcccaggtctgagtctaatggttcaggtgtgctggaaacccaacaaaaggtcagaggggggtcatgtgatctccttcaggtcccctgtcccacctctggtcaaagctgacacaggtgggtgcccgtgctctgcccagatctgcacccacagaaccagggctgctgaggacccatgagctgagctgcccatcctgggctttactctctctccatctgtagaatgaggagaatgcaacctgtcttccctccctccctcccatgcccctggggatttagggcagaagggaagcaaagcaacacccacactgccccagccctgaaggccagcaagtggctccactttgcaaaagaaggggaagtcctggtctggcacccaagggacctacccaggatggctccctggctctgcaccaccggctcaccctgggccaccagctgagcctggaccgtgacttcccttggagagttaaagatggtcacgctgatgacttcctccacgcccgcgcgaaaaacagagggagctgcaatcaagtaacccctgcaggaaaggagatccgaggtgaagttctcaccccagacccctggtctcgctgccaccacagctaggtcagggctctcctcgcagcagactcctgccttttgctgaccacacctggctggcattgatgctctaggagtctgtgcccccccatcagttcttgagtccatggattggctctttcacctgtgaagtccccatgctgggtaagaatctggcctcactggatttttcagcattgcacaacccctcttactctctctattccggcctccagcctgttgactcagctacttccttctgccccaggacctttttttttttttcttttcctggagacagagtgttgctctgtcccccaggctggagtgcagtggcatgatctcggctcactacaacctccacctcccgggttcaagggattctcgtgccttagcctcccaagtagctgggattataggtgcctgccaccacggccggctaatttttgtctttttagtagaggcagggttttgccatgttggccaggatgatctcaaactcctgacctcaaatgatccaccctcctcagcctcccaaagttctgggattagaggtgtgatccaccacgcctggcccttctggcccaggacctttgcacatgtcatgcccactgtctgaaatactctcctccacaagccaggtaaccggcaggatcccacttcatcctcacggtgcaccccgtcccccaccaccgtgagaagtgctgacatcagccccatttagaaagtcagaaaggaaaccccagagaagtcaagtcaccagccgcaacagtgacagaccaggattctaactcaggcggtcagactccaaaacctgataaaaagaagcaaagggcttctttgcaacattcattttaagaacaaaccctgaaaacaaaccatagggcctcaaacaaaaagagctctgaaaacaatggaatcaaagcaggcctctctttcctaaaatcttctgattgactatgaagtcacctctggaagggaggcattacccccagtttccccatgggaagttgatgcttcagaagaataggaacatgcaccagatcacacagccaggcagaagagggcactgaggtgcccttaggggacctgacctgagggcccaggtcctccccacctgagctcctgtctcccagtatctgcagccttccatggaaaattacaaaggccctgtaacctcatgaaatgcttacagtgtccccacaatcaccaagagcattatagcaaaggcaccacaattgcaaccatgtagaatgatggaaatcagaagaaaagagggtaaagggggaaactggaccatgcaatgagattaggagacattttcatttcaatattttctttttttatttttatttatttatttatttatttttaattgagactgagtcttgctctgttgcccaggctggagtgcagtggtgtgatctcagctcactgtaccctccacctcccaggttcaagggattcttctgcctcagcctccagagtagctgggactacaggcgtgcaccaccacacccagctaatttttgtatttttggtagagactgggttccaccatgttggccaggctggtcttgacctcctgacctcaagtgatctgcgcaccttggcctcccaaagtgctgggattacaggcccactgcacctggcctcaatagtgtctctagaacaacccaacatccacatgcaaaaagatgaattgagaacattacctcacaccatgcaattagattaactcaaagttaatcttagtaacagatctaaattgaagaagtaaaacttgtagaaacactagaagaaaacaaaggagaaagtcattgcatgcttagattaggcaaagatttcttgagtaagataccaaaaataagatccataaaataactcactgataaaccaaacttcatgaaaacatcattaccaattttgcatctcaaaagacgcagtgggtttgtgttgtttcatgcacacgaacaatgggtttgggttgtttactgcagccctggccacagtgtgcactgaccctgtgatcatagtgtgctacatctgccttgaataattaccagagttcagtcccctgggatcacacatgtgctgtccaactctaggaccaactggagtttgcaagaccctgggtatgtgctgtgtattacataactccagcactgaccaggacatgcaattaccctgtccaggtgtcctgtccagctccagcactggaatgtggcatcctttaaaaggggaatactctttctgtctggctcccagctgatccctagagtttagacgggcctcacatatagtacatggtgagtgtagaagagagagtaaggaatacgtgttcattttgcttggtcacctttgaaactcctgacaatacgggttcaagtcttcatccaactgcccagagaaactgacatcaccaaattaagtttccctgccattcagaagttgcagctgtttccagctgttgggatgcttgccagccattcactgtcacacctgacccacccctagcatctgggccaacactgcttctcatcctgctggtctcagaaggtcccagattggggaaagggatgtctgggtcagtgtagacagaattgctcttacaactgcaaactgtgctgctttctgggatcagagattcctcacacaaaaatctctcaggtgacagaagtgggcatccagagctattcctaagacgagatcctttgggctgggtgaaccatgcccctggcttagaggccagctaatctggaatcccaggtcggtcatttggggacatctcttccccagtgtgtctctcagcacagggattccatgtcacttaacagatggtaagatcacagggtgactttagtcagaggaaaacgccctggagaactgtttaaaactctctaacgggccaggcacggtgactcacgcctctaatcccagcactttgggaggcggaggtgggtggatcacctgaggtcaggagttccagaacagcctggctaacatggagaaaccccatctctattaaaaatacaaaaaattagccgggtgtggtggcacacgcctgtaatcccagctactcaggaggctgaggcaggagagtcatttgaacctgggaggcggaggttgcagtaagccaagatcgtgccattgcactccagcctgggcaacaagagtaaaactccatctcaaaacaaaaacaaaaacaaaccccaaaaacaacaaacaacaaacaaaaacctctgtataaggcagggtctctcattggagccaaggtctgtcatgtggggccgcgtcattccttgcagtggaagctgacctgcacatcgaaagctgtttaccagcattcctggcctgcacccacttaatgccaacaccaaatgcctctccctatttgtgacaaccaaaaatacctccagacatttcccagcggcctcagggagacaaaaatcccccccagggctgagaaccactattctaagggatgccagctttgaaagaagcattaggatgaaaatttgtagggttccgatttcacgaagcctaggagagggaagtctggatgctcagagcgcagtagactgtcttgcttttaaaactgtgaccagcaaggaccaactactcactgcaaataacgacacccacctagtctcactgcttaccagttttctggaaactcctaaacaagggctgcttgaacaagccgccttctaaacgcccagctggactaaaaggctggtcttgtgcagaccagggcagcccccctgaacccgcagccctgcagagctcacccgaacttgccaggtttagaaatattctctgtgaagccaacttagcagtactccccagcagttagttaattcaccttctccccgctgtcaacccaccagaagcctgcaagcaaacctctagaaaaatgtagaagcaaaacaaacacttcctcctccctcaccacgcccacccacgggaaagtgccccttcgcactctcctcccacttctcagccaagacgctcctcttaccttcataccttggacaactggaaatcgccacccatgatgacagcccgggtcacacgaagggggcgaggtggggcggggggagctgacctcagcacctttagcttttgggagtccctgtacctccacagagccacttcggaaactttagggcgccccctcctcaagacgattcgggaacaagaggccaggtccagcccagcgcggaggctgtgtggccttgggcaggtcgctgcaacactctgagccagtacccgcgacccccaccccagaaggcgaccgacctcctctgtcgccggaggatactcacggggcctgaggctgcgcggcgcgcacgccgtcccgcgccgacagcagcaggagcaggagcgggagcaacggccagagcagggcgccgctcatttttcggctcctggggggcgccgcgcctggggagggggccgggccagggctgggccagggccagggtccgagcgcggccgtcctcgcgccgccgccgggggccctttgttcgcagcccccgcgcagtgcgcccggcgccatgcgccccgctccgcgcccggccaagctggggcagccccgggccagccccctccccggacccgcctcgtctccgggaccgccccgctcgccccgctcgccccgctcctgggcgcaccctcccgggacgcctgctccgcccatctccggaccccgacccgccccgatcccttccggggatcgtcccctcacttactcaccggacccacccgggccctgcccgattccttccgaacccgcctcctcaccccctacccggattcgcccccggatgcccccctccccaccagccccgcctcggacccgaccccccaccgcccccactctccctctcctctccacccagcgtccactcggaacctgtcccttccctggcctctccctccctccctccccagccagccccttatggccccctccccgggcccgcccctcaccaggggcccctgggtctggacgccgcctgcaaccccgatcccacaggcgccgccgtgccctaagccctggcctgtatctagtgcccagtgcagtgcgtacagcccaaggagcagaggaccctttggggaaacagtctagccaggggtcgaacctcccagactcacatctgccccaggtccctatctgtgctctctgctcccctctcccccacccccactgtccacaaatcccttgggcccgtcccctctctcgctgggcctcagagtccccctttccccttcatacagcaggggtggatgggcaccccctttctctccaagagcagggtgtcccctcctgcccctccccgtgtggccacctcagtgatggtcctgctgtcctaggtcccactggcaggcggcacatcctataccatgtccaagtcctggaccccctccttccagtgtggaacccccttcccccagctaccaactgcccttcttctaaaattccagtgctgaccacaccccctcctgcccggaatcctcggggctccctgtttattttacattttatttttatgttttgagaccagagttttgctctgttgcccaggcaggaatttagtggtgcagtcacagctcactgcagcttcagactcctggagagtagctgggactacaggtgcaagcccgcacccagctaatttttatatatttttttttagaaacggagtcgcactgtgttgcccaggctggtcttgagcactgggctcaaatgatcctccctcctcagcctcccaaagtgctgggattacaggtgtgagccaccacatccagccagggcttcccgtttattgagaccaaatctaaactctggctttgatggcagagacctcagcctagttcctccaacaccctgttcttactccactgcctgcttctgcctaatctctgtcttcctctacctgcctcctttgccagtccaactcctgatccttccaggaaactcaagggaagcttctcttgccccctccctgcccctagggatgtgggtcctctgggggcttctcagccctgtcaacagcctttggacccaacactgatcacccaggcagcaccaagccctgggctgggcaatgaggaccctgggacatacaggacctgctgccactgagcacacaacccagaggggacgtaactgatgatggtgtgttggtgtgtgtgtgtgcgtgcacgcgcgcaggggccggagtagattgagtagccgtctctcctgcctggagaagaggaggagctgcctgcctccaagctcagaccaggccaaccccaaacaggctgctaaactcacatggaggtgcaaaaatctagcaccaagaagcagcatctgatctcaccctcatcatcgaagtttgccccatgccacccctccgggcccctccaggccaactctgactcctacctaagccaacctccactcctcagcctccaggccagcctttgagccctccgcctcccccttgaccattgggctctggccacatttgctcctgagatacatcagacccccacccaccaccaccatcttgggccaaggtgccagctgtcccctctgcctgggatgcacttccccgtggcatcacaagaccggctgctctcctccaccttcagggttagcccggaggtgccttccctgcctgcctggtttgtaaggtctaaaatgtcagtgctgccttggcatggttgagccacacaggaccacgatgtcctgaccgaccgttcagctactcttgccaaatatgccccctgcctggcaagagaagctgctctccacctggctgtctcaccaagcaaccagaccagctgcaccccacccatcagccacagacttcacttccctagctgctgagaagttattgaaacaagccatgcccagtcgtggtggctcatgcctgtaatcccagtactttgggaggccgaggcaggtggatcacctgaggccaggagttcaagaccagcctggccaacatggtgaaacctcatctctactaaaaatacaaaaattagccaggtgtggtggtgcacacctgtaatcccagctactcgggaggctgaggcaggtgaatcacttgaacccaggaggtggagtttgcagtgagccgagattgcgccactgcactccagcctgggtgacagagtgagactccgtctcaaaaaaaaaaaaaaaaaaaaagaaagaaagaaaccaatcacatcctcccaggagaaccaggggctgcctcaccctcttattactacaaagcctgcttcccacagcccctgcttgttcattgtgctcccgagtgcaacccctgtgtggcctcacacagtgtacagggtcctcctcccgtcattgtgtgagaataggtgagcactaaactgtagatctcacccacccaatgtcacatgttgtatgtttggccatctcatactcttttttttttttttttgagacggagtcttgctctgtcgcccaggctggagtgcagtggtgcgatcttggctcgctgcaagctccgcatcccgagttaacacttttctcctgcctcagcctcccaagtagctgggactacaggcacccgccaccacgcccggataattttttgtatttttagtagagacggggcttcaccatgttagccaggatagtcttgatctcctgacctcgtgatccgccctcctgggcctcccaaagtgctgggattacaggagtgagccaccgcgcccggcctattttttttttttttaacggagtctcactctgtcacacaggctggagtgcaatggcgtgatctcagctcactgcaacctatgcctcccgggttcaagcgattctcctgcctcagcctcccaagtagctgggactataggcgcctgccaccatgcctggctaatttttgtatttttagtagagacagggtttcaccatgttgcccaggctgttctcgaactcctgacctcatgtgatccacctgccttagcctcccaaagtcctgggattacaggcatgagccactgtgccgggcccatctcatactatttagagcagcagtccccaacctttttggcacaagggacaggtttcatggaagacattttttccatggacaaggggcaaggtgatgggagggacagtgatggttttgggatgatcaagtgcgtgacatttattgtgcactttatttctattattgttacattgtaatataatgaaataatgatacaactcaccatcgcgtagaatcagtggaagccctgagctgttgttttcctgcagccagagatcctacctgggggtgatgggagacagtggcagattatcaggcattagattctcataaggagcatgcaacatagatccctcgcatgcacagtttgtaatagggtttgggcttctctgagaatctaatgctgccgctgatctgacaggaggtggagctcgggcgataatgtgagcgatggggagaggctgtaaatacagatgaagctttgcttactcatccaatatcagaccagtgtcagtctgtggcccaggggttggggacccttgatttagatcatgggtgaataggagccaatgaggacactagcatggcccggtcatccagtttgactgcatggtacacaaaacacagagcatggtcttattattccatacacatctgcttcctgtctgtcttctttgggatgtgagccccccgtttgctgctggccgcagcccctggctcaaagtgggcacacctcacacagattactgcctcatcagcacacgggagaaggctcgctgcttagaagagtcagttgatactattccatgaattatacaagcctgagttaacaaagccatgactaaaaactaaattataccgatttgcaatgaaacacattatacaggttgagtagccaaaatgcattatcggccgggtgcagtggctcacgcctgtaatcccagcactttggaaggccaaggtgggtgaatcacttgaggtcaggagttcaagaccagcctgactaacatggtgaaaccccatctctacaaaatacaaaaattagctgggtgtcatggcaggcacctgtaatcccagctgcttgggaggctgaggcatgagaatcacttgaacccggaaggtgaaggttgcagtgagccaagaatgggccactgcactccagcttgggcaacagagccagaccctgtctcaaaaagaaaaaaatgcctaatctaaaatgcactttccaaaacggtcagtgcaagaaatgttccagatttttaatttttcagatttggggatatttgcattatacttactggtagagtatcgtgtgtgtgtgtgtgtgtgtgtgtgtgtgtgtgtgtgtgtgtgtgtgtgtagtctggctctgttgcctgggctggagtgcaatggtgcgatcttgactcactgcaaccttcacctcctgggttcaagcaatcctcccacctcagcctcccaagtagctgggactacaggcacatgccaccacatcaagctaatttttgtatttttatagagacagggtttcaccgtgttgcccagctggtgtcaaacttctgagctgaagtgatccacctgcctcagcctctcaaagtgctgggattacaggcatgagccatcatgcccagagtatctttaatctgaaaatctgaaatctgaaatgttttggtgagtgtttcctttgagcgtcatgttggcgctgaaaatttttaaattttggagcatttgtggaatttggattttcagattagagatgctcaacgtgtattaaaaatatggctgggcgaggtggctcaagcctgtaatcccagcacttggggaggccaaagagggcagatcacttgagaccaggagttcgagaccagtctgaccaagatagtgaaaccccatctctcctaaaaatacaagaaattagccaggggtggtggtgcatgcctgtaatctcaactacttgggaagttgaggcaagggaatcacttgaacccaggaggcagaagttgcagtgaactgagatcatgccactgcactccagtccgaacgacagagtgagactgtctcaaataaaataaataaataaataaatagcaaaggcgctgaaagtactcaaaactcatcacttcgtcttcattttactacattttacaattctctgtactcttgaggttatgcatggtgaaaatactccataataacacagatctcttcctaactctatgtttagtcacttcacgccagtaggttgaaattacccatgggcggagtacagtcacttccactttatcacttgttttgaaagcacaaatgtgttccgacatgatggatgcattaggaatgatttgagcataaaatcaaatattgtgttcacttatgtaagatttttgtctgcaagaaacattgggtatgaatgcagaaaactgcacctggctgaccccagccacgtaggaatacacaaaaaccacacctgcaccctctccagcatctctgtgctccctcagtgccttgctgtgtgccaggagccacatctgtccctgtctgaggttacaatatcccgcctgatttcagatgatctcctcccagaccttcacagtaactcacaggctgccacctccccatgcccaggtccacaaatgagccttcagtctttccaaggctgatactgtatttgtgtattttttttcttttcttttcttttcttttttttttttttttttgagatgggttctcactctcttgtccaagctggagtgtaacggcacaatcagggctcactgctgcttcaacctcctgggctcaagtgatcctcccgcctcagcctcccgagtagctgagaccacaggcatgtaccaccatgcctggctaatttttttgtatttttagtagagacagggttttgccatctcactcaggctagtctccaacttctggactcaagcgacccacccgccttggcctcccaaagtgctgggattatacaggcgtgaggcatcgcgcccggccatattcttgaaattcttaaccatttgacatttgtacaatgtcactaccatttttagtaggtgcctattttttttttaggtgtcattggtgacatttggatggttgtgccctgacccgttttcccatgagccctgtggtttgattgtgtgaatttgcagcgtgaggtcatttttaggaatggccctgttgtgtgagggcggaactggctgcattagccccatggtaagtggttgtcaaacatctccaaacatgcctaggatgagcagctttgcagtttggatgggggacgaggaagaccgcaaagactgtcctgttgtcaatgggcgtttttctttttttttcttttctttttttttttttttttgagatggagtctcaccctgttgcccaagctggagtgcagtggcgcgatctcggctcactgccaacctctgccacccgggttcaagtgattctcgtgcctcagcctcccgagtagctgggattacaggcacatgccaccacgcccagctaatccagctaatttttttgtttttttttagtagagatggggttccaccatgttggccaggctgttcttgaactcctgacctcgagtgatctgcccatctcggcctcccaaagtgctgggattacaggcatgagccactgcgcctggcccaatgggcgtttttctcccacttagccagcatgtgcctgtgcctgccaggtgcccaggagattggatgtcaggactgaagacagacagacagcctgatggcctgcagtgatctgggtcttctagcacagtgcccctgacagggttcctagggccagagggagatcaggccatgcctgtccaggacatttcgtataaatggaatcatacactatgtgtgcttttgtgtctgccttctctcacccagcatcattttttgtttgtttgtttttttaagatggagtcttgctccattgcccaggttggagtgcagtggcgcaatctcggctcactgcaacctccgtctcccaggttcaagcgattcttctgcctcagcctcccaagtagctgggactacaggcatacaccgccatgtccagctaattttttgtatttttagtagagagagggtttcactgtgttgcccaggctggtcttgaactcctgatctcaggtgatccactcacctcagcctcccaaagtgctgggattacacgcatgagcctctgcgcccagccaaaatatgcaatgacacctaccaggagtgaggcaggaatgattttcttaataacatgtttattattcttttctcccccttgctttattgtcagaatacgatatataatacatagaacatacaaaatatgcgttaattgatcgtttatgttatctgttgacttctggtcaacagtaggctattaatagttaagttttgggggagtcaaaagttatgcacagattttcaactgccaggaggctcagcaccccaaccccattgttcttcagggccaactatacatctgtttagaaaaacaaaaatgtacactgaagcacaaaaattgggccaggcacagtggctcacacctataatctcagcaccttgggaggtcgaagtgggaggatcacttgaggtcaggagttcaagaccagcctgggtattatagtgagacttcatctctacaaaaaattaaaaaatttggccagatgcggtggctcacccttgcaatcctagcactttgggaggccaagacaggcagatcacttgaggtcaggagttcgagatcagcctggccaacttggcgaaatcccgtctctaccaaaaatacaaaaattacccgggttggtggcaggagcctgtaatcccagctacttgggaggctgaggcaggagaatctcttgaacctaggaggcggggttgcagtgagtcaagatcgcgccactgcactccagcctgggtgagagactccatctcgaaaaaaaagaaaaagaaaagaaaaattagctgtgtgtggtggctgagtggcctccaaaggtggcttttagggggacatctgggatctgccccagcaagtcccagctattcaagaggctgaggcaggaggattgcttgagcctaggatttgaagctgcagtgagctatgattgcaccactacactccagcctggatgacagagcaagactctgtcttaaaaaaaaaaaaaaaaaaaaagccggcgccgtggctcacacctgtaatcccagcactttgggaggccgaggcgggtggatcttctgaggtcgggagttcgagaccagcctgaccaacatggagaaaccccgtctctactgaaaatacaaaattagccgggcatggtggcggcgcatacctataatcccagctactcaggaaggctgaggcaggagaatcgcttggacctgggaggcagaggttgcgatgagccgagatcgcgccactgcactccagcctgggcaacaagagcaaaactcggtctcagaaaaagaaaaaaaaaggatggggcaggataacaggatgcaggcctgggactttccatggaggaagaggcctcagaaaggtctatgtctgggacaaggcgacctgaagtgcccttgggcttaacctcttggactcagccctctctggggtttggagatgccagctgccccaaaaaccgctccgagcacaagcaatgtgccacacagccctgtggcaggaaggagctcgtgcccgctccaagtagcaccaagcgtggaggaaggcaaaggagactcgggctgccacaggccctctctgggtgtggggaccagagatcaagccaggttcccattcttgccctgtgaatcctgcactgtgtcctcagggcggggagtgtacgcaggccatcgggggacagcacagggcagttggtccccagccggtggggaccagtgtgtaggctctagggtcagcctcagggtggccttggggatgtgcagctccttggagaagatgaactcacagctggtccaagctctgacgtcacttccgggaggaagcttcagcctcataactccagaaccacttccctaaaatccgagtttgccgagtttttgcttcaaccatcttgagtagctttgtcctgcctggaccctgagtctgagcaaagataatgccctgtgatcatccagccccagacagccttgaggcaccaccgcagccccactgttcctggggcatgccctagatgtcccctgaaggctgccctcggaggtcagtcagtgatccgccctctgcaccaagagggcttcttcccatctttctggctccttctggcagcttcaccatggtgaagccccttctggggtgctccttcagctgggtgactgtgcctccaaatgcatgcttgtgaagtctgcacctgcccagctcacctggggtctgtctgcacctgcccagatcacctggggagccatgtctctgtccaccttacctggaggctgtctctacctgagctcctcatctgggggctgtccacaactgcccacctcacgcgggagctgttcacacctgcccacctcacctggggtctgtccatacttgtccatctcacctgggggctgtccatacctgcccacctcacctggtagctgtgtccatacctgcccacctcacctgggggctgttcatacctgcccatctcacctggcggctgtccacacttacccatctcacctggggactgggtccctacctgcccatcttacctgggggctggccacacccgcccacctcacctagggtccatgtacccacccacctcacctagggactgtctacacccgcccacctcacctagggacggtctacacccacccacctcacctagggactacacccacccacctcacctaggtccatgcacccacccacctcacctggagggccatgtctctacccacctcatttggaggctgtctacaccagtccctgttgcctgggggctatgtacacctccccatcccacctgaggactatgcacccatccacctcacctaggatttacccacacccacctgggggccatgtccccacccacctcacctgggagctaactacactcgctcacctcactgtgtccctacagggtgagcacaggcggagggcagggagtggggcaggagtgtcagggagcagggcaggggtgtgtgcgtctgtccgggaagaagggtggagatgctgcctgcagccctttttacctgcacctgagccctcagtgcagctctgcatcagacactcccagggcccggggtctggtgaccggcaccatctcctgtctcttaggtggcatctctgcccaaccattccttcttagaggctcctgtgacatgagagcaggaatggggcctgggacagcactggaataagaaaaccgaggccctggccaggtgcggtggctcacacctgtaatcccagcactttgagaggccgaggagggaggatcacttgaggtcgggaattcaagaccagcctggccaacatggtgaaaccctgtctctactaaaaatacaaacattagctgggcgtgattgtgggtgcctgtaatcccagctgctcaggaggctgaggcatgagaatcacttgaacccaagaggtggaggttgcagtgagccgagactgtgccactgcactccagcctgggcgacagagcgagactcggtcaaaaaaaaaaaaaaaagaaaaagaaaaagaaagaaagaaagaaagaatggaggggcagggtgggagagagagagaaaggaaaagaaacgaaaagaataagaaaagaaaagaaaagaaaagaaaagaaaagaaaacaaaactgaggcccagacacgattcagccccagtaggcaccctggcaagctctgccttctgggcaagcaggctggaaataaaagcaccacagtgaacaccctggcccgcctcggctccgccagcagcatctgtcctggagaagacgccagctcagtaccagaaatgttccggacacaacctggaccgggcagaagctgaggagccaccaggctgccagcagttccaagcacatgctaggggctgcggagggggctcgccaccctctaactccctgggggtggcctcgtccagccccgcaggaggcctctgtctattggagctaagcctggagacggccactccggccaatggcctgtccaacccaggtgtagacagcccctgagtgaggcaagcaggcacatggccccccaggtgagctgagtgggtacatggcctgccgaggtgaggtaggcaggtataggtaacccccaaatgaagtagacaacccccaagatgaagtgaacaggtgtagacagcccctggtagacaggggcatggtcctccagataagacgggtaggtgcatggcctcctagacgacataggtggtagacagcccccaggtgagggggacaggcataaatagcccccaagtgaagtggacaggcatagaaaacccccaggtgaggtggacatgtgtagaaatcccccaggtgaggcggacaggcgtagaaatcccccaggtgagttggacaggcgtggaaatctcccaggtgaggtggacaggtgtagaaagcccacaggtgaggtggacagacgtagaaagcccacaggtgaggtgggcaggcctagaaagcccccaggtgaggcagacaggtgtagaaatcccccaggtgagatggacagatgtagaaatcccccaggtgagatggacagatgtagaaatcccccaggtgagatggacagatgtagaaatcccccaggtaagatggacagacgtagaaagcccaaagctgaggtggacaggtgtagaaatcccccagctgaggctgacaggtgtagaaatcctacaggtgaggcagacatgtgtagaaatcccccaggtgaggaggacagttgtagaaatcccccaagtgaggtggacaggcatagaaatcccccaggtgaggtagacagggacatagcccccaggtgaggtgaccacttccttcccttccttcctcccatcaccaaatgtccacagacaccgcccccacccaggccagcataccaggtgctggagactggcccagctctcagtggctcccaatattttggcagatcagttccaaacaggtgcattctagaaactctgacagcagggctcaccccacagggcaccggtgaggatgggaacccaggaatgtaaggccagccctgagcctggacctagtcaatgttccataaacggcagcctagggacactgggaccaggcagcccaggagtgggagggaggagttggctcctgctggatcatggtggtggggcagggtgggggtcggggggatgttgcaggaggagacgtttgtttcatcacttgttcatgcaaaccttctgaggcaccctcgccattcagctccccaggcccccatccagcccacagcctctgccatccctgccctaccctgggacttggactctcattgccctgtgagcccggctggctcattcccgcttcccagccagcagcccctcacctgccagggctccaataagctttggctctggagggcacccacactgcccctcctccagccatctttttttgggagtataattggggtataatttacataccacaaagttgacccagtgaaagtgtctggttcaatagatttactattgattaagatctatttaatcaatagattttagtatacttacagttgtgcaactgtcatcacttctatttcattctagaacatttcatcccccaaaaggagaccccgtccccattagcagtcactccccattccctctcccaaagcccctggcagccactcattgcttcctgtctctatggatttgcctgttgtgggcatttcatatcaatggaatctcacactatgtggtgtttcgtgactagcttctttcactcagcattgtgattttgggggttttgttttgttttgtttttcagacaggatctcactgtcgcccaggctggagtgcagtggaatgatcatagctcactgcaggcttcatctcctgggctcaagcgatcctcctgcctcagcctcccaagtagctgggactacatacaggtgagcaccaccacactcagctttttttttttttttttttttttttttgagacggagtcttgctctgtcgcccaggctggagtgcagtggcacaatcttagctcactgcaagctccgcctcccaagttcacaccattctcctgcctctgcctcccaagtagctgggactacaggtgcccaccaccacgcctggctaattttgtttttgtatttttagtagagactgggtttcaccgtgttagccaggatggtcttgatctcctgcccttgtgatctgcacatctcggcctcccaaagtgctgggattacaggcgtgagccaccgcacctggcccacccagctaatttttatattttttgtaaagcagggtctagctatgttgcccaggctggcctcaaactccagggctcaagcgatcctccctcctgagcctccccaagtaccaggattacaggcatgagccactgcacccagccttatttggtttttgtatgggtctgctttatttttctggtattggtcttaagttctccaatttatctcctcccgttcccccttcatttctttccaatcaagctgtttctctccctccccatcactcccctgaaactgatttcatcaatgttaccaatgatagacaatttccttaattgaatgttctatttgtgtgcttgttttatttgatttacaagaagcattggacacagctctctttttctttcttttcttttcttttctttctttgagacggaatctccctctctttcccaggctgaagtgcagtggtgcaatcttgactcactacaacctctgcctcccaggtccaagcgattctcatgcctcagcctcctgagtagatgggatcacaggcatgcaccaccacaccggttaatttttgtattttactggagacagagtttcaccatgttggccaggctggtcttgaactcctggcctcaagtgatccacctgcctcggcctcccaaagtgctgggattacaggtgtgagccaccatgcccagcctcttttttttttttttttttgaggcagagtcagtggcgcaatctcggctcactgcaagctccgcctcccgggttcacgccattctcctgcctcaccctcctgagtagctgggactacagccgcccgccaccacacccggctaatttttgttgtattttttaagtagagatggggtttcaccgtgttagccaggatggtctccatctcctgacctcgtgatccacccacctcggcctcctaaagtgctgggattataggcgtgaaccaccgtgcccggccccatgcccagcctctttaacaaacatcttaattggctttatgattgcaggtgtactttggttcagcaactccaagggcccacataacctgcctcagaactccgcatatctgccttcttccatcctgtggtccctcacaccagatgtggtgggtggcagtcctaacagcctcctgtccctgaaacctgccggtacctctcactgcaactccgggaggctggtacaaatgctcctatcccaggtcagccctggacccggaggccagagacaaaaagaccccagctgggcttccagctccccaggggaaagtttggtgccgaaaggaaaatatttacgtggtttgtaagttgagctatccccctgcagaagtgatcaaaaggacagtaaagatggaaagtccgtgttgtcgtgatgcaggctgtgccaagccacgcagcaggcgtgatcctggaggactcttcagggagctgatggacgtgacctgccgacccttttgttttctgaaatcaccaaacatctgctgagtgagctgcttcctggacccttttgggaatgttcccaggcttggttgttgaggaaacacagtgcaggggtggagtgggttctggaggctgcgacttggccagagccgcctgtgtgcgtggagcggggtgtggggggtgtttggatcacctccaggggtccttttcagcaggaacacacgagtcatttttaatcaatcaaaaagaggaaaagagacaaaatgcatttaatgaacactcccataccatgctgtgatgaaatgcttttaaaagtcacaagaggccgggtgcggtggctcacgcctggaaccccagcactgtgggaggctgaggtgggaggatcactttgaggacaggagttcgagaccagcctgggcaacatagtgagacctcatctctatgaaaaataaaaattaaaaaattagctggccatggtggtttgcacctgtagtcccagctacttgggaggctaaggtgggaggatagcttgagcctaggagtttgaggctgcaccaagctatgatcgtaccactgcactctagcctgggtgacagagtgagaccctgtcgaacaagaaagagagagagagagacaaagggagggacggaaggaaaggaaaaaagaaagctaggcaccaggcttctgttgtgaattaaatgtttctatttctcactcactgcaactcagaccgccacgcctcacgcagatttatcagaaagcatctgcaggccaggcatggtggctcacgcctgtaatccaacactttgggaggctgaggcgggagaatcacctgaattcaggagttctagaccagcctggccaacatggcaaaaccttgtctctactaaaaatacaaaaaattagccaggcatggtagtgggcgcctgtaatcctagctactcaggaggctgaggcaggagaatcgcttgaacctgggaggcagaagttgcagtgagccaaggttacaccattgcactccagcctgggcaacaagagcaaaaactctgtctcgaaaaaaaaaaaaaaggcatctgcaaaggttatagggagattcctggggggaagaaagcagcctgcttgaggaatcttttgctcacaggtaaaaaagcaagaaggccaggcagtggctcacacctgtaatcccaatgctttgggaagctgagtcaggaggatcacttgaggccaagagtttgagaccactgtgaacaatagagggagacccaatcactaaaaaatatttttaaaattagctgagtgtggtggtgcacacctgtagtccccgctactcaggaagctgaaacaggaggatcgcttcagcccaggagttcaaggctgaagtaagctaggattgcaccattgcactctggcctgagcaacagagtgagaccctgtctcaaaattaatcaaaaatggaaaaataaaagccaaaggaaaaccaaatgggtctttcacacaaatgtgaaccagaaccttccacatcagcacagagaggaggaaaaagaaccacagaggatgaggagagaagagtgctggcccgggtcccttgtgctaggaaccagctggatgccaggacacatcaggcacagccaaatcccacatgggtctgcagcaggggcacccgggatgattatgaggtactcctagggagagctcatagtcccagccaatgctcctaattgcctggggtcagtaggtcgctgagctaatcctcctgagcacatcgggggtctctgccatcactgagcggggcttccagaactccctgcaacccaatcaagtccaattagccaaaaaggcaggaatgtgggctgggaccccagcagggcttagaggtctcggcaggagaccagggtggcccagggatgtctcacttgtggggaacaagccccagaccccagccttgtccagggcagggagggaggaaacccccaggctcgggtcagtggggtctgtctgttcagtggggctttcagctgtgggatccggggacatcagtgttggtgggtaatttgatgttctgctcatagatgcatgatgatttaaaagccacatttcagtaagtcaggcagaggaggacaaatattgcttgattgcacagggaatagccaaattcctagagacagacagtagaagtgagactcccaggagctggggtagaggactggagactggtttaagggcctggagtgataaaaactttggggtgtagatatggtgatggttgcacacattgagaatgcatttaatgtcactgaattgtaccttccaagtggttaacacgatcattatcatgtagagttggggtttttgttgttgttgttgttgtttgagacagagtctcactctgtcccccaggctggagcgcagtggcatgatctcagctcactgcaacctccgcctcccaggttcaagtgattctcctgcctcagcctcctgagtagctgggactacaggtgcacgccaccacacccggctagtttttgtattttcagtagagacagggtttcaccatgttggcctggctggtctcgaactcctgacctcaggtgatccacccgcctcggcctcccaaagtgctgggattacaggcatgagccactgcgcctggcccatgtagagtttactacaatgtcaaataaagactttaagtttgaaattagcatttaaccatttaaggaaattggttcatgaaatgtgtagcttgatttattatttgcgtggcagtgtttaaatattcgggaaaatgggcagagcgtggtggtttacacctgtaattcccagcacagggactgtctagggggactgaccctaccaggccaggtgatggttagagggctgagctgaggggcaccagcagggggttcagactcacacccaccccaggatgatgttgatgcagtccccacccagggtctcagatgtgggaacacgcccctcctttaagtgctacctgccactattgggagtctgtgtaagactaacactccattctttaaaaaggtaagcacatggctgggcacggtggcctacgccggtaatcccaacactttgggaggctgaggcgggcgaatcacttgaggtcaggagttcgagaccagcctgaccaatgtggtgaaaccctgtctctaccaaaaatacaaaaattagctgggtgtggtggcacgtgcctgtaatcccagctactcaggaggctgaggcaggagaactgcttgaactgaggaggcgggagttgcagtgagccaagatcgtgccatcgcactccagcctaggtgacagattgagactccatctcaaaaaaaaaaaaaaaaagaaaaaaaaagaaatcctcccaccttagcctcccccaaaaatttttaatattcaatttattaagcatttccatctaggaagtacatttccccaaatatttaaacattgtcatgccactaataaatccaactatacattaatgaaccaatttccttaaatggttaaatgctgattgcaaacttagtcaaagtctttttcttgccattgtagtaaaatatacatgatattgatcatgttaaccacttggaaggtacaattcactgacattaaatgcattcccaatgtgtgcaatcatcaccactatctacatcccgaattttttttttatcactccagcccttgaaacagtccccagtcctctaccccagcccctgggagtctcgcttctactgtctgtctctaggaatttggctattccctgtggctcccataagtgcaatcaagcaatatttgtcctcctctgcctgactgaaatgtggcttttaaatcatcacatgtctatgagcagaacatcaaattaaccaccaaggccggtgtccctggatctggatcccacagcccaaagccccgctgaacagacagaccccactgacctgagcctgggggtcccctccctccctgccctggatggggctggggcctggggtctgtttcccacaaatgagacagttcctgggccaccccagcctccctgccgagaagccccccacctgctggggtcccagcccacattcctgcctttttggttaattggacttgattgggttccagggagttctggaagtccccctcagtgatggcagagacccctgatgtgcttgggaggattagctcagcgacccactgaccccaggcaattacgagcattggctgggactctgagctctccctaggaggaccccataatcatcctggggtgcccctcctgcagatccatgtgggatttggctgtgcctggtgtgtcctggcatccagctggttcccagcaccagggaccaggaccagcactcctctcttcttgtcctctgtggttctttttcctcctctctgtgctgatgtggaaggttctggttcacatctgtgtgaaaaatagtgttagttttcctttggctgctaaccttacctaattacctctctaataatgaccttaactccaaatacagtcacattctgaaggactgtgttataaccttcacgtatgaattttggggagacacagttcagcccatactcttccccacttacagaggagatgatggaggctcagagaggggaagtcatttacccaggtcgcacagcaaaagggagtaggacaaacatcgaacacttaccgggtgccaggctcaatttcaaggctgtgtttgcctcacttgttcattttgccaatgtctattgtgccagatgcaaactgaagtgaaatacactgatgggactgggcatggtggctcacgcctgtaatcccagcactttgggaggcagaggcaggcggatcacttgaggtcaggagttcgagaccagcctggccaacatggtgaaactccgtctctactaaaaaatacaaaaattagctgggtgtggtggcacacacctgtagtcccagctactcgggaggctgaggcaggagaattgctcgaacccgggaggtggaggttgcagtgagctgagatcacaccatcataccactgcactccagcctgggtgacagagtgagactccatctcaaaaacaaacaaactgggtctcactctgtcgcccagactggagcgcagtggtgcaaacgtggctcactgcagcctcgacttcctgggctcaagcgatcctctcaccttagcttcccaaagtgctgggattacaggtgagagccactgtgcccagccttatccttcctttctatattgcccgtggttgcttttgtgcaccaaggtcaatccaaaaaataattgagtcagtgagacacagaccatctggctttacttccttgtagtcacaactctggggattctaagtctgaccatcctagccccatggccagggatgtcaggagatgatggtggtcattttgagcagtaggttcccttgcaagccatgggaggacacaggctgtgtccaggacacatcccctggaggcgtgggtgtggagaccatgagccgaattcattcattatctaaaatcaaactcaattctcatgaagtagggacgtcagccttacagagtcgggcatgtgccgcccatttccacctgtgggtggaatccaccactcctgttgactctcagcggtgcccggcttagatgatagattctagggtctctgctgttggaggtcaagactgtgatgtaatgaagtatttttttcaatgtgtgtcctgtggcagtgcccaattcagaaaacatagagcaggattttagttccaaatgagtcaagttttatatgttaagacatcgcttgttaatcttgcacataacatctatcatattcatatgctgcctagtcttgggtttttgtttttttttaaatctgagtctcactccgtcacccaggctggagtggcagtggtgtgatcttggctcactacaatctctgcttcctgtgatcaagtgattctcctgcctcagcctccagagtagctggcactacaggcacgtgtcaccacgcccagctaatttttctatttttagtagacagagggtttcaccatgttggtcaggctgttctcaaactccaaacctcaaatgatctgcccgccttggcctctcaaagtgctgggattacaggcatgagccaccgtgcctggcccaaagacatcctcttttatctgctcatgtggatttaatgatatccccttggggtataataaaaacttctttggtctttgtccacagttcctggcacgtaactcctaaatccctagaatggacattcattcataggatgaacgaaggtgttaagatgagacagcactatgggccaggcacggtggctcgcaacactttaggaggctgaggtaggcaggtcagttgaggccaggagttggaaagcagcctggccaatatggtgaaaccccatctctcctaaaaatacaaaaattagttgggtgcagtggtgcacacctgtagtcccagctacttgggaggctgaggcaggagaattgctcgaacccaggaggcagcagaggttgcggtgagccgagatcatgtcactgcactccaggctgggcgacagagcaagattctgtctcaaaattaaaaaaaaaaaaacaaacagcactatggaagcgttggctgaactgaagcaactgcgtggggtccctcaatattaaagggctccagacaagtctgctgtatttgccccagtttgcagaaattttaaaagctgaaggcagacactacaacatgaaacccaacctggactcactggggacaaccaggcagattcgtcgcactccagcccagaagacagagcaagccctgtctaaaaccaaacaaagacaaaccaggcaacaaaacccacacctccagcaatacgaattggaaatgtgacctggggatcagtaagttcccaaagcccacaccgcgtggggtggaagctggagagctggttggaggaaaatgttctgggccaaagtcccagtggagcacagatggggtttatggcaagagcctgagcatctcccagtgacaactaccgagactggaactgaaatatgtcccctccagtcgaggtgcgggatgccgggacccagtggtggacgtcctggagggcgggacccagggttccctggtggaggtgtggaaggacgagaccctgcagtctctcaagctgccagcgagatggggacccagagacctcccgaagctgccagcaaggcagggacccagcagtttctcaaggctgcctgggacccagttgccagattacgaaggcatctcaggccctggagccagagccagtcgggttaaagtggaagctccctacttcagccccagaagctggggccaggggaaggatgatgtggattgttcttgttttaccccttctgttgaatgtttacagacacaaacttgagttccaataaagaattgcatttccctaaaaaagtaaataaagtatgtccactcgagggacaattcttaacttgctgtcccaaaaccacccttgtgactgaaggacatgaaatcatcttgaaagtgggatactgggcatgtcgtggaggcccggaatttcaggaccagtcatccagaagaacttgagaaaacacaggtcttccaactggccccttcatagaaaatggaggcttcaattgcaaaacaggtttacttttttatcaaacaagattatcacataaaaaatagctacagtgctacggtagtatataaagtgctcaagtatcctgaatgtaaccatgagtcatgacaagtccctccctgaacgagagagagagggcgggacttctgcctggctgcttgaagaaaaatcttcgcttgggctgatgaacgtggcctgagcgggggctgacgaggcacccgggttgtcgtcctcagacaggggcgtgttcttgggtgctcccccagattctctgcaggcactgtcttgattgaaataccaccggctggggggcgccatgccctgggtctcttcccagacttcctggtttgccaaggctgcctctttgcttgcctctgcggagagttccagcacctgggcaaagctcctgttgaggatgggagaaagaataacggctttcaccctctgaggtgaagcgcatgtgtgtggtgaacggagggctgccacacggggaggcggattttcacatgccctacgtgctcagtgggaaagggccagcaaataagatccgtctgaaaagactcaatcagggaaaccccccaagaacagcaccagacatgaaaggaaagattcatccaagaaatgttcatggagctcagtgctgtgctgctgctgtggtgggagtatctgtcccctccaaaactcccattaaaaattaatcccctggccaggtaaagtgggattgaagtgctgtaatcccagaactttgggaggccgaggcagacagatggcttgaggccaggagttcgagaccagcctgggcaacatggcaaaaccacgtctatacaaaaatttttttaaaaatactgggcgctgtggctcacacctgtaattccagcactttgggaggctgaggcgggcagatcgcctgaggtcaggagttcaagaccagcttggccaacatggtgaaagcccatctctattaaaaatacaaaaattagccgggcgtggtggaacgcacctgtaatcccagctactggggaggctgaggcaggagaatcgcttgaacccaggagacagggtctatagtgagccgaggatcgcgccactggcactccaacctgggcgacaaagtgagactccgtctcaaaaaaaaaaaaattagctgggtgcagtggtgcacgcctgtagtcccagctacttgggagactggggtgggatgatcgcttgagcctcggaggcagaggttgcagtgaaccgagatcgcgccactgcactccagcctaagcaatgaaatgaaatcctgtctcaataataataataatccccaatgtggcagcagcgagaggtggggcctttaagaggtaactgggttcatgaacattctgccgttcatggatgaatgagttatcctgggagtgggactgtggctttataaccctttgatgtctcctgaattgatccatggccacccacaggagaaagaaatgccacagtgggtggctggctgttttgcataagtccttttccaatattttaagcaactcaggaaaaagatttagcattgtaaaaaagagaaaagatactctactggaagaggtggagaaaagcgcgtggttagaaatctcctgggggaggttaaaaaaaaaagcggggggagatcttgatgggttttgggggtctggacgcacaaggatatgtgctctgtgcaagccactgcacagtcctttaagatctgggccatttctatcaatcagaagttcaaaaaacatcctcctgggaccttaccctggaaggcattgaaaacaccaacagggctgatgtgagggcgcctgtgctgctgggttactctgaggatgtgaatgataggtgacaccctttctcttccagctgcttgagaacttccatagattttttttttttttttttttttcctgagacagggtctcactctactgctcaggttgtaatgcagtggcacgaccacagctcattacagccttgacctccccaggctcagatgattctcccacctctgcttcctgagtagctgagaccacaggcatgcaccagtgtgcctggctaatttttgtgttttttaaatagagaggcccggcatggtggctcacgcttgtaatcccagcactttggggggctgaggtgggcagatcacttgaggtcaggagttcaagaccagcctgaccaacaaggtgaaacactgtctctactaaaaatacaaaattagccgggcgtggtggtgtgcacctgtaatcccagttagttcggaggctgaggcaggagaattgcttgaacccaggaggtggaggttgcagtgagccaaaatcatgacattgcacttaagcctgagcaactctgtctcaaaataaataaataaataaatagaaacaaggtctcaccatgttgcccaggctggtcttgaactcttggcctaaagtgattctcccacctcggcctcccaaagtgctgggatgacaggcgtgagccactgcgcctggcccttccatggatttttctgagctcttttgttctctcttccccctgctctgcttgagtcttatactctgtgaatctaggacacgtcttatagcatatttgatcctcacttcacctagagtccccattagctcaaaaatgactgagaagtaggctagaaaagggaaattagctgggcatggtggcgcacacctgcagtcccagctactgaagaggctgaggtgggatcacttgagcccagcaatttgaggttgcagtgagctgagatctgccactgcactccagcctgggcgacagagtgagaacctgtctcaaaaaaaaaagaaagggaaggcaaggcgggtgcttttggatggagattttgttatccacaatacagatgacaatgacacctgctggccattcttgtatcatgcagcgtctgggaaaagagcagctcgctcaggggactgaacctcctctgaactcctagaggaactcggcaccaccccaacagtgcagccaccaacagccctgagcaaacagggtgccacctctttcttaaagcattttccgaggtaccttcggagctcaaggtcctttttcgccgtcacgtccttgagttcgctcagtaagtccagcacctgcacattttcttccgaatcaccaacatcaagttctcccaggaggcgctgagtggtcaccagttcatgctgcagggcgtctggaggggaagagggatggtgggcgatggatggcaaggtgccccacgcaaggcacacacaagtggagcggccgacagacttctgtcatgatgctcggctatcgcgctggaaccgtggagagcgcacagggaagaagcagaagccaaggaagacattcgtcccttatccatcccgtgctctgagattgtgggacaggcacatccatctatccaggagggcattggaccagaactgaaatgtcactctggtgtcctcaacagaaaccaatgcaaatgtgaaaagggctgtgctgtgccagggagaatgcctgaggcctccaagccagaccatgagcaactgaaaaacagtccttgttgcctgcaccactgagcagaaggatgcctgcaactgcgggacctgtgtcacctgcactaggacaacacgcctctctaccctgacatacatcacatcaaggccagtcgtacatgagagtcacattttgggagccttttaagtgccgtatcagccagcctcttctccctccggctgtggaccgaattatgccctccccaatacgtacgtttcactccaatcctccactcctagtgaacatgaccttaaccagaaacagggttttgtggatgggggggagttaagatgggtggggcctaatccagtgacttgtgtcctcatcggatgcgggaaatttctttttttcttttttttttttttttgagacagagtcttgctctgtcacccaggctggagtgcagtggcacaatattggctcactgcaacgtccactttccgggttcaagcgattctcctgcctcaggatcctgagtagctgggattaccggcacctgccaccacacctggctattttttttgtatttttagtagagacagggtttcaccgtcttggccaggatggtattgaactactgacctcgtgatccacccgcctcagcctcccaaagtgctggcataacaaacatgagccaccgtgctgagcctgatgcaggaaatttcaataacgagacagccagggaggaggccacgtgaggacgggcagagaatggagggacacggccatgagccaaggaacgccaagggccaccagcagccaccagcaggtgggggagacacaggatgagctcacctgacagcccctggagggagccaatcccatcaacgccttgatttcagacttctggctgaaatcaagactcccagaactgggagggaatatctttctgttgttgcaaaccacccattctgtggccgcttggtatggcagccccggaaaactcaacacgatccctaggccgttcccaggaactacctaaggaactgagcagagactgagtgttttctaagagttacagatgtggaggtgaccgcagtcataaaatcagaaacccggccgggcagggggctcacacctattcaggaacccagtgctttgggaggccaaggtaggagatcacttgagcccagcagttctagatcagcctgggcaacatagccacacctcgtctctacaaaaaaaaatataataattagccaggtgcgccaggagcagtggctcatgcctgtaatcccagcactttgggagggcaaggcgggcagatcacctgaggtcgggagtttaagaccagcctgaccaacatggagaaaccctgtctctactaaaaatacaacattagccgggcatagtggtgcatgcctgtaatcctagctactcgggaggctgaggcaggagaatcgcttgaacccaggaggtggaggttgcagagagccaggattgcaccattgcactccagcctgggcaacaagagtgaaactccgtttcaaaaataaattagccaggtgcagtggtggatgcctgaagcactagggaggctactactcaggaagctgaggtgggaggatctgagtagagcctgagaagttgaaggctgcagtgagctataattgcactactgtactccaggctgggtgactacgctagaagattccacctccgcagaaaaaaaagaacaatggcagggcatggtgactcatgtctataatcccagcactttgggaggccaaggtgggaggactgcttgaactcaagagttcaagtccagccttggcaacatagcgaaaccccgtctctacagaaaaaaaaaaaaaaaaaaaaaaaaaaaaaatatatatatatatatatatatatatatatatatatatatatatatataagccaggtgtggtggtgcccacgtgtactcctagctactcaggaggctgaggtgggaggatcacttaaacccaggaagcagaggttgcagtgagctgagattgtgccactgcactccagcctgggcgacacagcaagatgctgtctcaaaaaaaaaaaaaaaaaaaaaaagaaccaaactccagggtagccaaaaacttgctctgtgggaagatacctgttctgaagagaatttaaggtgcaacgcggcagtttttcacacttgccaaagtcttcaagttagggattaggtgggaaccctatgcctgaaagggacctcactgctctgctgagggggaaagccggggtggggctggtggtcttgtcaccccccaaccactacggcatatttgttgggagcaggactcaggagactacaggtcgtccccgcaaaatgcctttcggcaggacagatcactgtgaatcccactgcccaaggttcaaatcccagtgtggttacttactcagggcgagacccttggaggaaccacagcctggccagccctccccatcctctgccttagttggggaagagggcacttgcggtgatgacatcaggcccacaggaagcacccacacacgctcctcgccccgcctgctgcacacgcactgggacgccccgtttcctacctaagagctgctgcccatctccctccaggtggatggacctcacgggcagctcgtgcctggtagtgtccagggccgtggcgaatgtcctgtattgctccttgaagcgtgtggccactgcctcgaaggggctgagcatctcgatctgtaagcagaagggataatcaggggagaccctggagtcccctctctggaaacttaacagaagcttaacggcttgtgcagggttaagatacagcgctgttcttcaccaccccccagggaatcagagctcaggaagtttccgagggtgtggtgagctcttcccaagagagccaagtggatggcaaggcggcccaggccccttactgagaacatgtgtctgccagcggttctaggcttgggccctcagctgagcccacctgctttagagtactgcgcctaaacgcctgccttccacaaggccatccccggcatggcccactcccaccccaaacatgctgtctgggtcttcatgggggtttgaaatgatatacgattgacccttgagcaacacgggagtttggggcatcaacccctgtgcagtcaaaaatctgtatctaacttttgacttcccccaaatttactgatagctactgctgactgaaaccttactgatagtaaacattcaataaacatgtaaatagattagcatctatatacacacacacatacacacacacacagacacacatacagacacacacacacacacatacacatatatattttttagatggaatcttgctctgtctcccaggctggagtgcagcggcgcagtctcggctcactgcaacctctgcctcccgggttccagcaattcttgcgcctcagtctcccaagtagctgggttacaggcacgcatcaccatgcccagctaattttttgtatttttagtagagacggggtttcaccatgttggccaggctggtctcaaactcctgacctcaagtaatccgcccacctcagcctcccaaagtgctgggatcacaggcgtgagccactgcacatacatattttttatagacagatcttactgtgttgcccaaggtggagtgctgtggagtgatcacagttcactgcagcctccacctcccagggtcaagcaaacctcttgcctcagcttcccaagtagctgggactataggcatatgccaccacacttggctaatttttaatttttatagaaattggccggatgcagtggctcacacctataatcccagcactttcagaggctaaggagggcggatcacttgaggtccagagttcgagaccagcctggccaacatggcaaaaccctgtctgtactaaaaatacaaaatttagctgggcgtggtggtgcatgcctgtagtcccagctactcaggaagctcaggtatgagagttgcctgaacctgggaggcggacgttgcagtgagctgagacagcaccactgcactacagcctgggtgacagagcaagacgcccatctcaaaaaaaaaaaaaatttttttgtagagattgggtgtcactatgttgcccatgctgggacaagtatgtatgcactcatgacatgcctaactttttcttaattttttcagtatttctaggctataaggttcatctatgagtttcttcaaattgtcacaaatctctaaaactttttccaatatacttattgaaaaaaatctgcatgtaagtggaacctcacacttcaaattcgtgttgtttgagggtcaactgggtttgtctctttttcttccattttgagctccctaaagtcagagaccttgtactcaagcccagggtctagctgcacgggtgctcacatgaaaattttggatgttaggggttgagctgtatccccccaaattcatacctgatgatccaactcccagtaccttggaatgtgcccttatttgaaaagagggactttatcagggtcatcaagttaacatgaggtgataggggggttgtaggggggatgctaatccaacacgactggtgtcttgtggggaaagggggacacagacacacacagcagggaggacatgtgaacacagagaagacaaccattcacaggccaaagacagggccaggagagattctccctcgcagccctcagacagggccaaccaccaacacctcaatctcggactttcagcttcctgaaccgtaagagaatgaattccagttgttttgcccacccaggttgtgggactctgtcccagcaaccacaggaaactcacccactgggtggggggtccgcccctgccaatcagccctttctgggttccaggggtttgttcctgtccttctcccacatggacactgctgaccacacagcattaggagtgatgtgcctctcaccagtaccctgaccctgcaggggagtcccagagcacgtcatcctgttgctgctcacgatcatcaggcgctcaggaagtctctgcacaagtgcatagaaggtgcacacctcccttattcattcacactttactttgtaacctcattctctaaaagtgtcatcatagaccaacaccaggaccagagcaagtgtggcattaaaagcccaacacagttagaagccagtgagcaatgataccctagcacgaatgctaccgaaacagtggagatgggacagattcacagggaacactcactggtcacagagtgtcacttacaactgacctgggcatccaggacatctgccagctcccgcttcctctgagagaggagaagcctgcgcttcagctcgtgggcctttttctgtagcttctccttctccttacacattattaataaattcttttctgcccttctttcaaactcagcaagattgttctccatctgttaaatgtgaaagaaaagctcaagcaggtggggactccctccccgtgaatggaggccacccttccatccatggcatacgtgaacaagaaactgttttcacctttacggatagtagcgtcagcagtagtgtctgagactccatcatttccattgcttcagataaatccttaagaaaagaaaaagaccctctcaattcctgatgaagtggtataaatccagctcttttcccagcagggggagaactctggcttgtgtggattttctgtattcagtttgatattcggtagttctctactgtagtgggtctattgcttctattttcttttatttggttttctgcggcgctgagatgaaagagggaggtccacaaccttccttcccctggcacctggcaggtggagagacagcagcagctgggtagtcaaggacaagctgagaatacccaccaatttggtgctgcaccaggaccagaatgccgtctccccacctgctggtcccccaaccaccagtcttgtcctcaccccagtgagaccacagcctagccgtcctcccaccaagggacagggcctggcattgtgcctttcccagcacagcatgggcacagagaagtcccctgtctcattttttacatggctccatattggtatccactactgaatgtgtacttggggaaatgtaaactctacaaatgatctaagaacatctgtagtcttgatttttgtcctaaagggcatgggtgtcttttatgttcttggatccgtgggcactcagcatctggttcagagtggactctaaatcagatctatgcaacccatctgtggctgccctcttctttcagacacttaccgggctctttttccgaggggcagaaaatgatgttgactcaggtttctttgatattgtttttgctaactgtggcgtctttttgacgatgcttttgtctaagataaagcacagcatttttaatggcaagtagcgtatatagactggtccctggttgccattttttttctaatgatgggtttattgggatgtaaccccatcataaattgaggagtatatggacttataacagtccagttaaagttgttcaactttgcaaggggcaaaaggcaagtttaataccctttaccaaggtattaagtatatttttgatgtacaatattttcaacttacaatgggtttgttggatgtgaccccactgtaggccaattgtactttggaagcccactgagacctactgcaacccccagtgagtgacagaaggggtgaaacaaatgatttaccattaatagcagagagatccaggtcaggtggagctgtgccatgcccttccagcaacgtggactgcaggtcaccctttccgaccccactgctatctgctgttaagaaaagaatccccgaaagtcagcacagtcaagagacactctccattcaagccaggaaacgcaggccgtgtttttgaacaataccacttgcttctaaaagcccaatttcgtccaaggtggaaaggctaaaaaaaaaaaaaaaaaaaaaacctgtggaaattcccagccatcaccttgactctatttttaaagtaccactagaagacagagacattctgtataaccaaagagacgcaaataggcctttctgctagttcacaagatgctacaggtgggatacgatgccatattcccattctaccctctactctctttccaccttttttgtttttgagacggagtttcactcttgtcacccaggtgacaatggtgcaatctcggctcactgcaacctccacctcccgggttcaagtgattctcctgcctcagcctcccaagtagctgggattacaggcactcgccaccatgctcagctaatttctgtattttagtagagatgaggtttcaccatgttggccaggctggtctcaaactcctggcttcaggtgatctatccacctcggcctcccaaagtgttgggattacaggcatgagccaccgcactcagccaagtaatctttccatcttttttctgcagcttctggactgttcatcctccctgggagttcccttcatcttttaacgtatattctaaactgtaaaattaagccttacactgtctaagatgggcactagcatacagcatgctaccactacacaagagcccaggagtgctgcagatgccaacagatggcacgtacggtatgttgtgttaggaactaagcatgagactatttcatgaacaactatgcagctgaggaaatgaatgacctggaaatgaaaagaggaaggtcactgcaatgtgtagggtacaatataacaacgatttgtgttgaaattcttaaaaaaaatctggaaagatcagcaaaaatctattgagagcacatgccctcagggcacagactgggagcctggggtgaggaggtggaaattttctttttttttttttttgagacagggtcttgctctgtcacccaggctggagtgcagtggcacaatctaggcttactgcaacctctgcctcccaggctcaagcaatcctcccacttcagcctcctgggtaactgagaatacaggcaagtgtcaccatgcccagataattttttatttttttatttttagtagagacagggtttcaccatgttgccaggtaggtctggaactcctgggctcaagggatctaccggcttcatccttccaaagtgccgggattacaggcgtgagccaccacacccagctagaggtggtaactttttattgttattgcttttgccctggaatattttatcatcagcatgtatagcatttgcactaaaaaaattaattttctacaaagccatacaatggaactcaaacaagcagtcctttgaaatcattatggtgtggtttaaattaaggtttcttagccatggcattgcgagcacatggggctggatccttccttgcggtggtgggggtgtcctgtgcattcaggatgttaagtggcctccctggcctccacccaccagacgccagtagaaccccttcccccagatatgacaaccaaacacatctccagacactgcctaagcgttccctgggggtcagaatcgcccttgagtaagaactggttttaaggtgtggcaggcccagtctgatcccctggccacaccagcattcccagcttcatgcatggccttcaacccaattagatggggaaagactagcaggctggctctagtgtgcctgcttctcaaccacgcctgggaagggcatagcgcgaattctcacaaacatctacaccaggagtggcaaattgtagctcataggccaaatccagcccgcttcctttgcttgtaaatagttttattggcacacagctatacctgttcctctatgtctggtctggggttgtttttaatgttacaaacagcagagctgagtcttcttgttgatgttgttgagacggtgtctcactcggttgcccaggctggcatgcaatggagcaatctcggctcactgcaacctccgcctcccaggttcaagcgattcgcctgcctcagccctgcaccctcaccccaagtagctgggattataggcgtgtgccatcatggccagctaatttttgtatttttagtagaaatggggtttcactatgttggccaggttggtctcgaactcccgacctcaggatgagtcctcacagcctctctaagagtcttgctctcagagcaccagtgggaaaacagtcacatagacaagaaactgatgtcacaaagcagtaccatgatggcaatgtggcttttctctggggccacacagggaagaaatgatctcccctttgctccgcatccccactcacctccccacatccccccagtctgtccttatgctccaactctctctgctcactgcttctgacccttcccagaaaggaaagaaggaactttaacttagcacccatggagacaaaatttactgccgcgctcatcactgcccgaggaccatggctgtttcgcacctttgcttttctggagcaggctggatttccttccaccttcagacatcttccctcgggtctgtgacccatctcctgcaggagcctgttatgggaacacatgacactcagaggacaagacatcctcccttcacaacaacgggccctgatgcggtctgcactgtgtttcgtaactgctcttactttgaggcaggggagacatttaaagaggtttgaaatcttacctcatatacacaggacaaacaaattttgtcaaaatgtagatgctcacttgcagagaacataggaaactaccaaaatgtttgctggtgattattgacatggtagattacaggtgactgatttttttctagacacatttaagtatttgctagttttccagagagaacatataactttggtcatcaggagaaacaaagtttttacacatatgttgtcaaaaaatatttttttaaagaaacacatggagcactggccttctaataaccaaaagcaaaacaaaaatcttataaagagcaatggccaggtgcagtggctcccgcctgtggtcccagctactcaggaggctgagttgggaggatcgctcgggtccaggggtttgaggctgcagtgagccatcacaccactgcaccccatcctgggagacagagcaagaccagagcaacgacatgacgacgcacagacaccactctcattcaatatcacagtggaggtcctcagataagaagtaaaaggcaaacaggttgaaaaggaaaagtaaaactctgttcttacaaacgtaatttttcatgtaggaaatccccgaacatcttcaaaactgctattaaaattagtaagtttaacaagagttttctttcaattttgtgtgtgaacttgactggatatggggtgccccagactgaacatttttgggtgtgtctgtgagggtgtttactaatgagatcagcatttgaattggtggatgcaataaactgccctccccagtgtgtatgggcaccatccaatcccttgagggcctgaatacaacaaaacagtggaaggaggagaaattcataccttttgcttcctgcttgcctggttgagctgagacatcttaccccatctcctgacctgtcctcaaactgggacttacacctttggctcccctggtctcagcccttcagactcacactgaactaaaccaccaaccttcctggctctccagtttgcagacagcagatcctgggatttctcagcctccataatcacatgagccaatcccgtgtaaataaatctccttttatatattcatatccttttataagcctctcttattggttctgtttctctggagaactctaatacagcaggggtgcaggacacacgatcaatatgtaaaaattcatatttctagcaatgaagtagcaatgaacaagtttggagattgaaattaaaatagagtaccatatacaatggcactaaacaccaaatgcttagttataaaccaaataaaatatgtgtaagatctataatctggaagctacaaaacaatgttggaggaaatccaggaagatctaaataaatggagaagcataccatgttcatggattgaaagactcgcttttattaagaaggcatttgccctgatttatggattcaatataatcaaaatccagcagatattttgctagaaaatgacaattctaaaatctctatggaaagccaaaggaacgagaagagactaaacagtctcggaaaagcacagtgagaggtctcacattacctgttctcaggacttagtgcaaagctacagtaacctcagcagtgtggaactagcataaggatgcatacatagaacaatggaaaagaacagagcccagacatgatgtgcacatacatggtcaactggtatttgacagagatgatgagagaatacaacgggaaaaaggaaaatcatttcaataaatgggattacaacaactgaacacccatacatgaaaaaacgaactttgatttaaacatcacaccatacacaaaaactaactcacagacttaaaagtaaaacctaaactacaaaactcgtacaagaaaacaggagaaaaatctgtgatcttggattaggtggagatatcctggataagactccaaaagcacaatccacaaatggggaaagtgatcaaatgggcttcatcgaaatcgtcaactactgcctcttaaattaaagcacttaacagcatgaaaagacaagccagactagaagaaaatatttgcaaagcaccacaaagagctggtatccagaatatagaaagcaccctcaaaactcagtaacaagaaaacaactcaatttaaaactggacaaaagatctcaacagacacatccgcaaagatacaggaatggcaaataagcacatgaaaagatgctcaatatcatcggctattatgaaaacacaaatgaaaaccacaatgaagtatcacttcacacccacaagactggctagaatgtgaaagtaacaacttgcacttttcatctatgtgcctagtgggaacataaagatggtgcagccactgtggataacaggtagtttcctgttaccattatatagagatgttttcatctacaactcatggcttgtaactcctataaacccttgttacagtaagcaggatctctctgacctcccacactcctttcacctgccagagagggtcctgcctcataccccagaggaaaaaacgcaacagaggccaagaagaatctgaacagacaggacttgctgggtttaaagcatgccctttttgaccaatcacatttccacagggctgtccatgcttcaatcgtgcctaagtcatgaagactctataaaaacccaaaggagctgggcgtggtggctcatgcctgtaatcccagcactttgagaggccgaggtgggcagatcacgaggtcaggagttcgagaccagcctgaccaacatggagaaaccccgtctctactaaaaatacaaaattagctgggtgtggtggcatgcgcctgtaatcccagctactccagaggctgaggcagaatagcttgaacccgggaggcagaggttgcagtgagccaagatcgcaccactgcattccagactgggcgacagagcgaggctctatctcaaaaaaaaaaaaaaaagcacagagcttggagagacttcagatcagatagctaacacgtggagattcccaaagggtggtatgcccgaacaggccatggaagctctgtgcgccttccccccatatctcactctacacatctcttatcttctaaaaaaaaaaaaaagagacaggatctcactgtcactcaagatggagtgcagtggctcactgcagactcaacctccttggctcaaatgatcttcctgcctcagcctcccgagtagctgggactataagcactcaccactacgcacagctatttttatttttttgtagaggtagggtcttgctatgttgcccaggctggcctcaaactcaggctcaagcaatcttcccaccttgacctcccaaagtgctgggattacaggcctaagtcaccatgcccagccacttggctaatgaaaaaaaaaaaatttcagagacggggtctcgcccatgctagtttggaactcctggcctcaagcaatcctcccatttcgacctcccaaattgctgggatttcaggcatgagccaccacacttggctccatctgtatcctttataatatcctttataataaactggtaaacctaagtgtttccttgagttctgtgagtcactcctgcaaattaactgaacccaaagaggggggtcatgggaatcccaacttgaacttggttggtcagaagttctagaggcagaagaggggcagtcttggagactgagccctcaccctataggttctgatgctatttccaggtagtgtgtcagaattgaattggaagatacccagctggtggctgctgcttgctggtgggggaaccctcagaagtcctgtgttgactgttgttgagtgggagaataggaaacacagtttgagtttttctacgagccagcaatcctcctcctgggagaaataaaaccacgtctacacagaaaaatacacaagaatgtttacggaggctttattcataatcaccaagacaggaaaccaactgactgcctgtcaatcaatgaacagatgaacacaacgtggtccatccacttgatggaatactattcggccataagaaggaaccaggccgggcatggcggctcatgcctgtaatcccagcattttgggaggctgaggcaggtggatcatttgaggccaggagttcgagaccagcctggccaacatgctgaaaccctgtctctactaaaaatacaaaaattagccaggtggggtggcacacacctgtaatcccagctactcgggaggctgaggaaggagaatggcttgaatccagaaggcggaggttgcagtgagccgagatcgcactactgcactccagcctgggcaacagagcgagactccatctcaaaaaaaaaaaaaaaaggaaggaagcacctacatgcaatacatgcaacacagaggaacttgaaaggcactctgctaagtgtcaggagtcagaggcaagggctacaaactgtgatgccacagatatgaccttctaaaaaaggcaaaaatgcagattcagaaagccaatctgtggttgcctgggggtgggagaggggctggtcctatcagagcacaaggggatttagggatgactcgttctgtagcttgattatagaggcggttccatgactgtctatgtctgtcaaaacaggcaagaccctatgctgaaaagggggatgctgactccatgtaaatgacaccctgatttttaaaatggggggaaaaacagaaaagatctaaagggctaaaatgttacagcacgcagacacacgggggcgctgtaaccaagtcttggcaacaacatgaaaatttggagcgtggaagactgtgaccctttgttgaaaactgctctgagaagagtatctgtttgtgcaaaggtatcctcttttctcaagccgaatcttaagtcacagggtcgagaacccaccagccacccagagtggaagacaggcagtgggaatttgacttaattttatcataaaccaagatttggaaagcagagggaagaatccaaccttgacttcactgaaagaaaatatataattgtataatctactgattgctcccacgaactctcacacaaagcacgttctcacgtggttaaatatctttcatgccattactttcaatggtttcacgatatttcatggtttgcctacacaatagttcactaaactcttactccaattcggagtgatcgaaggatgtcatttttcccatagtttttctctaaaaacctgtttttttattttattcttttttttttttttttttttttttgaagacacgggtcagggtctcgctctgtcgccaaggctggagtgcagtggttcaatcttggctcactgcaacctctgcctcccaggttcaagcgattctcctgcctcagcctcctgagtagctgggattacaggtgcacgccactgcatccggctaatttttgtatttttagttgagacggggtttcgccatgttggccaggctggtctcgaactcctagcctcaagtgatccgcccacctcggcctcccaaagtagctgtttttaaataccagccagacaccaagaactgtgtgctgggcactggataagacagcttcagaatccagaaagcgaattaactgggttgaaaggcaagaacaggctgggcgccagggctcacacttgtaatcccaacattttgggaggccgaggcgggagcatcacttgagctcagtagctcaagatcagcctgggcaacatagggagaccctgtctctacaaaaacgtttaaaaattagctggtgtggtagcacacgcctttcgtcccagttactcagaaggctcaggtgggaagatggcttgagcctgggaggctgaggctgcagtgagtcgtgatcacactgcactccagcctgggcaacagagagagaccttgcctcaaaaacaaaaaaaaagggtaagaacgataccatgtttcaatggagatcacagcttcgtaaaagagatgcttatagccatgagccgtcgatgacagactcacaactggcagcatgaagggctgatggtctcaaaagcacctgagtgaagatcccaaaatgcttccttcaggaccaggttgtgaccacctcccatgactagtttcggaattccagttgctcagaaccttgctcagaactgctgcaaatggaagctgggtgcggccttaccttttgggttgtcttcttttcatactgcagataccgggactcaatcactcttccacctgtggggacacactgttggtgcacaacaaaactacaaaggaccgaagaccccacacacccagaccccacgccccggagacccagatgccaggggccctctccactcagtgaccagaacagaggaggtcaccactcctcctgctcgcctctgatcacgtccttcggcagcctcaagcatgcatgggacgcctactgtatgcaagtcccaagccatgtgtggagtcacagagttcctgaggaagtaagatcaaggaacaccctccaaggtcaaagctgcaagtgcactcagacaagcgggagggaaagaagaaagagctttcactgacggcctccaggtggcttcctccttcctcccatctcgtgtgaccccaatggccccttcccccgcctgtgtgtctaggactcactcctggtactaccttttactccccccgccccttactcagtttgggaccccctgccctgagacatgcccaacacccaggccctcttcagacagagccaaatccctagtgacagcccaaccccaggtccccttccagggctactcctgggagcgtgactgtggatggaacaaatgccacctgtcaccccagcttctggaggtaggggtctgaactggatccggttagtcccattctgtcccccagccctctcccggacccctccctcaaaactgttcctcccacctcctacgccaggcccaacccttggtctcagcaggtgacctgtttcctccttcactgggaagacagaagtggccccaggagaccctcccgccaccacatccagccacctccagtcctgatggctgcattcccccggccctgtgaatggacctttgtgctcccagataaagcgccccccattctgggcgctaaagcccagccctcacttccaaaaggaaatgccccgcaactcccacctccctgcctgaatccccacagctcctctctccaccagatgctggaggtcattcttcctcctacctgcactctctgcctccccccatttctcccatccccttgacagcaaacaccccaagttctttattcaccagctcccctttctctcctttctccttcccttgaatcccgccccccacaatccagcttgcagacacaccaccgcaccagaacacctttggacaagaccaccgtgacctcccttgctcctgagcccagcagtccattctcagtcctggtcatctgaaccaccaggcacaaccactgctcgttccctgcttcctgaaaccttccatcagcctccaactgcccttcagggctgagacaggctggcgtgctgggtccatgggctcaggaagcctaagtgcctccgggaaccttctggaccctgtgccaccaacaacttgcctctaaccttatcactttgtcacctctcacttgctctattcagccgctctgccgcgtggacccccttgctgtgcatccccctgcaggcacctccctctctcaaggctctgctcagttcagaccacagcacacttgtctctgcctgccatttcgtcacagcatctgtcatcatctagcaaccccacagcctccttacggttctcatgcaatgcccacctcctccctagagccccaggggcccaggatttttgtctccttcgctcgctgctatgttccaccacctggtacggggtaggcactcgataatatgtcaaatgaatgattctaggccaggcgtagtggctcacgcctgtaatcccagcactttgggaggccaaggcaggcggatcacctgaggtcaggagttcgcgatcagcctggccaacatggagaaaccccgtctctactaaaactacagaaattagccaggcgtggtggcatgtgcctgtaatcccagctacttgggagactgaggcaggagaatcactggaatccaggaggcagaggctgcagtgagccgagatcgtgccattgcactccagcctggcgacagagttagactttgtctcataaaaaaaaaaaaacggttctgcattgtatcggtgccatagagctcagaggtttgcctttgtactgaagaggcccggggagagtgacatgctcaatgtcacacagcttgagagttcagccaagtgagattgtgactttgaccatatctttgttccagttgattcttctgttggggactggggttgcagctgctaccctgagaggaaaggaggtaccctcagagttaacaaggatccttcagtcagccaaagggccgggctgtcaatctgggcagccccagggtaggaatgcaccatgcctgcagagcgagtgtgggtgcaggtgggtgcccggcagatgtggacaatcggaaggccactctcatggtgcaggtctccaagggctgaggccaggaccaggtggggtcccagggacaaccaggccacaaaaagagtctaccctggatggtgatcgaacagctgagagaaaggacatccccagctcccagcagaaagaccatccagcccgggtctttctagtagcatcaggaaacagttttgctcaacaaggaggatctcaggcttgggctgccttggacggtggggaaacaaaagcactttcaagtttcctgaaaactaggatacaactgtttattttaaacagcctggctaggtgcggtggctcacacctgtaatcccagcactttgggaggccgaggtggacggatcacttgaggtcagaagtttgagaccagcctggccaacatggtgaaaccctgtctctactaaaaatacaaaaatgagccaggatggtggcagctcccagctacttgggaggctgaggcagagaatcgcttgaacctgggaggcgggagctacagtgagccgagatcacgccactgcattccagcctgggtgacagagcgagactccatctcaaaaaaataaatacaaataaataaacaggctgaattttccacagaagcaatattatgaagaaggatacaattcttgtccaagaacgaggtagctcataaatattatagctgttatatgcgagattaacatgcgatgtttagaatttgggaataagtggtcaggaaataaaaagacaacttacccagcaatgctgaaacatacaaaccttgcctcacttggaaataaaatcctgctctaagctcgctgaattgggccctgcgacactgcacacactgagaaaatacctcattgtatcatagtcttggcctccaatgatggactctagaatctaccatgcaagccgagcatttcctttttttttttttttttttttttgagatggagtttcgctcgccacccaggttggagtacagtggcgcgatctcggctcacagcaacctccacttcccaggttcaagccattctccagcctcagcctcctgagtagctgggattacaggcacctaccaccatggccggctaatttttgtatttttagtagaacgaggtttcaccatgttggtcaggcaggtcttgaactcttgacctcatgatccacccaccttggcgcctcaaactgctgggattacaggcgtgagccaccgtgtccagccacatttcctttttttttgttttgttttgagacagagtctcactctgtcgcccaggctggagtgcagtggtgcgatcttggctcgtgggggaggccgttaacggtgatcccagaccgataggtggaaatcagatgtacaggcacccctcatgagactgacacgctcacgcagtgggaattgagagtttgattttaggccgggggcagtggttaatgcctgtaatcccaacactttgggaggcagaggcgggaggatcacttgaggttaggagttcgagaccagcctgggtaacatagtgagaccccaactcaaaaaaaaaaaaaaaaaaaggcagagtttgatttttgataatgatctccatggtctccacacccacgcttccaggggacatgtcccggacacagcccatgacccccatggctgccaagggaagccactgctcaaaatgaccaccaccattcctgacacagccctcgccacagggctgggatggccagacccagaatccccacaggtgtgactacaaggaagtaaagccacaggcccccttctctggcctgtttttttcttcctccaaaagcacgtaatgaaagaagaaaaccatgttccttaaagagatcctgacactgcttaccttgaactcttttatccttcttcttggcactgctagaatttgtggggccggttgcaggcttcctgcaagagaagagagagaggtcttgttcacctcactacccaagaagcacagggaagccggcgaggtgcctctgctagttgaagctcagacagcccagtccaagggctgccagaggacaatttcagtgagggtgggccacctcaacaggaaaagggacacaaggagcagccagccctggtcacctgggcaagaaggcataggtgaacacccaaactgagaagagaggagggtaatgagagctctgtggaagagatcacagcagatctcaaattatccctgggttcattcattcaccagacattgatgcacctactatattccagtagagacacagtggtaacaaaacacagagctccttcccagaaagggaagaacaacatcttgacaggcaggtacgaggagtggtcccagcaggtacctcactttgggaggctgaggctggcggatcacgaggtcaggagatcgagaccatcctggctaacatggtgaaaccccatctctactaaaaatacaaaaatgagctggggtggtggcatgcgcctgtagtccctcctactcaggagactgacacaggagaactgcttgaacccgggaggcacaggttgcagtgagccaagatcacgccattgcactccagccagggtgacagtgagactccgtctcaataaataaataaataaaaataaaaataaaaataaaaatagaatgaagcctgatgtaataggaaagaagggaccctgagataggaatcgctgactcatcagctgtgggggtgcaggagagggagaatctgggatgactaggggtttcagggtttcagcctgagctggtgagaaaagaagggatccaagaacagacaccagcaacacaggaggggcaagtggatgggcaagtggaggggcagggccaaggccagggcactgtaactcctgctcccatcaccaaaggcggctccactggtccctgcggccacctcctctgaagcaggctcccaggaccccaaagtgagacccagacaatgttggggacacttccaggccaccgtggggagaggcaacttagcaaatgttcgccaggtgccagcagctgcgctcgcccgtaggctcctcctaacccgacagcttcctaactgttcacacctgctttttcgtcgctgcaaaacaaagacgcacaggttttacataggtcacccccggggcagtctcacagccagaaagagacaagagcacagactccctctggggactgtgctagggctgtggcctcaaaccgaatgggctcctgggtgaacctgctgcgacctgaggggggtccctacaacctgtgcgagcctcagctactgcacctgtacctgggaggtgctactgtcaatctatcggttacggcaaggggcggtggagtgattcctcttgctggccaatttcacttcagtttgcacctggcacaatcaacactggcagaattaacaaaactagacaaatatagcctcatgatcattcatgcctagctctcggtcagtattcaacttctttcttgttcatggtgtgttaccctaggcaagtcacttcccctccctgggtctccatcatctcctcagtaaactgggagcacagaataaagcgcgtgggaggattaaaggggacactttggtcgcccaacacttgttcactgcataacgataattccaagagcgacatcacagtaaagacccaggcgccgatctaagcgcgtttcagcctcacgcgacgcctacgaggttgagctgcgtcatcggccccatttcgtagcggaggaaagcgaggcactgggcggtcaggccgcttgccggaggtcgcccagcgtcccagccgaggacgcggaactcagggccggtcgggtgtcagcgctccggagcatgcgcagaggcagcacgccatcggggtcttcaggggcccgcgcagttcctggcggggtcgaacccgaactcaccccgagggtcctaactccccacctccgctgcccatcctctccagccctatggcgtctacaaatccagacctgcggaagccccaactcacccagcgcctcgccccgaggaatccgccattttcccgccttccacctcaaggcccgacccgccggcttttcaaagccggacccgcccccttgcttgcgggtcggaccatttgtggagacgcaggaggggtggctgcgaggcgtgaggcagcgccggctaagtgtggagagcgcggccccagacgcgcgcttcgcctgtcctcccctcgcacttggtctcgcccaccatcggcggtagtgggtaggggcggtgggtgggacctgatctgtcggacagtaggggcggggcttttcgcgatgccccgcccctaggagcgctggcgtcacgcccccgtccccgcctctccggaacccggaagcgggagcgcgcgggggagcggcgggcgcggcggggcggagcggctcgagcagcggcgggctggcaggcggtcgtccggccggggacccggcccgggaccggcggcgcgcggcggccgaggccaggtgagtaccaggcagcctcgggttggcgactcgagctcgaagcctgcctttgggggctgcgcagaagagggacggagctgagggctgatgggggacgcgacggcaggggtcgagggggcgggaacgagcctgggggtcttggagagattgctggggatgaggtggaagcgagacggtgaaggagaaagtggatggggatggagctggtgagggagttcgagggcgtggggggggtgagtcttgtggctttgagcagcttctctgaagaggacgtggcttaagtggtaattggggggtcgcaggaaacggcgttgtggggaggcacggaggcgggaacgagaggcccaggctgggggagtgggcaaggccaggggcgggacagccggggtgcggttgaggggaaggggtgcgagaccgatctggggacgtctgcccgcgcgattgaaggaagggtgtctgagaagagggcggcgcctggcccccagtgggcgctcagtaaatgcggggggttctgaactaactgatgcggcagccggctattgggaagcggggaaatgggagctggaagggaagtaaacggagtagaagtcacggtaagaactgagggtaggcttagggagggagggcccggagaggagggaagagaaggaaggggttagagtggccccgtgcagatagatgttgagatgcagcccctggagattccgtccccccaccctcccctcttgattcgtgtccctcctgacttcacacttaacagctgggtgacctgggacgagtcccaacaccctctgtgccagtgtcctcgtcttggaaacttcaccaccctccccttaagacaggactagcaggattctgggattccctggatccaaggaagggacctcagggccggttgtggggccggaactgtgtttcaggagggagtgtgcatgcaccctcatgtacaggactgtcgccacctccgcagagctgcatccttggacttaaatgggtaaaacgacatacaggaaatctgtcccccggttgctctgagctcagccctggagaggcacgacagccacgagccctcctttctttcctgggcaccctggaggccaggggtctttaagggatggcttctctgcctctttgtctgaggtgggagcccgtggggacactttccagccagagagtcccaactcggtttgttttttgatgttggagtcttcagaatcttaaggtgtccaggagcagccggaggtgacctgggctacaggaaagttattcacatctgacaggcctggctcttgtggccctggcagggactttgtgcagggtgcttttgattggcattcatttctcccctttcccaactgtagggatctttatctgggatctgccagaagggctggggaaccccagcttatgtttagtttatagctcattcaggagatgaacccggatagctggaatataaagagggccacagaaagataagcacccccttcacttccagaatatcctggcctttaggaaaggtggctttggcctggcttgccccaggacatgcagtgacagcccacagtcatgcctcctgcaaacattgaactgtaggcttgcactggcctacagaacaggaccgggatcttctgatcccgcagccctgcaatcgcctcttccctgccgctagagaatggccaagcagggtcttgtggggggagcactgtgttggagatcctggctttggtcaagtctctgtgcctgtttctgacctctcacctgcaaaatgaatgaattgacctccatcagcgtttttcaaccttgaaacccaactcttctcatcaccgtcttgtctccagtccatgtcccccagctcccggccttgaactcctcacagcacccccactctccattcctggctgcgatgatcctacttttattccgttttccattcgacagtttgtatccaaaaatgattttttttcaaccgcttcttcatcgtccaaatagaaaattgcggtgttgaaggtgcttttgcacattgcacctattcccaaagctttggaaactgcaaatttctggaaatcccgaggcagtaccgtccctcgggtccagtctggtgactcagtggagcaggtagagacgtgggaatctcccctttctgtttggctgtaggattcgttattctctccccacatggacttgttaacttgctgcttcccattcctcatctcttccaaatggtgtgtcttgggtgggcctagatttcagttaggcaagggttgattgtgccagacacttggtagattcctggggacagaggtgaatccttatgacccagaggacggacacgctaatgcccgcccccgacaactttgcacttcctcttcagaaagaatggagttcaagctgggccgcggtggctcaggcctgtaatccctttgggaggccaaggtgggtggatcacaaggtcaggagttcaagaccagcctgaccaatatggagaaaccctgtctccactaaaaatacaaaaattagcccggcgtggtgatgtgcgcctgtagtcccagctactctggaggctgagacaggagaattgcttgaacccaggaggcggagtttgcagccagccaagattgcgccattgcactccagtctgggtgacagagcaagatgccctcaaaaataataataattaaaaaaaagaatggaattcagatcaggtcatcagtacggtgacagaggggccacaagatattatggggggagaattagggacaaccaatgcaagctttaggacaagggggattccagcaagtttcctcggaagtagtggctggccccaggtcaaacctggaaagataccacgtgttaaaccactccgggtggaagggattgcacaagcagatacctttgaagcccggcctgtacagggcatcccagctctctcattctgccaaccggcagtgcgagggtccttgttcttatcttcctgatacagaaacaggcccaggcaggtgatgacttcagagatggttccttgagctttctagaaacatgcaggatccttagtaacctttaactggggaaacccaaatctccagggccgtttctcacccgcatcaccattgacagttggggctgtgcactgtagaatgtggaatagtgtccctggctgtcacccatgagatgccagtagtattccatcccctccaaggggtaacaactgaaaatgactccagccatggccacgtgtcccctgggggcagaatcacctcccccgccaggtgaaatgtgatgctcattagtaaaacctggttcccctctagggcccatcattgccttggtgggtccttggtgtttgtggagcccctgaggaactgccactaagagtgggaacaggggcagagaccaggaactgaatcctgccatccagtcagttcttaatcaggagggagcgggtcttgataaaaaggaggaaccgttaggaacggactgtgggagggtaggcaacgtgcccgagggtggacagcgggtgcccttgtcttttctttgtcttgtgactgacctggatttctggaggaactgtcctcgtcttagaatgatctgttgcttttcttctgagattagaggtattagattctctcccaagagctactttggaggttgccccggataaacgtcgcttttgtaagctgcattatctcttccatgggccctttcgcccgcccgttcccaagcacatactgctgaatttttgttcttggtccatcttgctgtccccttccctgcttggccccctccttgaccgtgactttgctgctttaccttgattggaggagacgctctggggccacgggactgacggtcccttctgggtgctgcccccacaccccacccaccagccctttgtgtgcccggcatccccagcccagctgtgccaggctgcccctgctcggccggccattcagacggccccaggcggcctctcggcaaagcaagacaagcccttctcttctgccctcgtggtccctggagtggcagaacaaagggctctgtctccacaccagcccaccgccgcagcccagagccccgttccctttcaatttctatcgtggctgggaaagagcctcagagattaggcatgtttcagaaatgcagctgacgagtttgggttctactcatttcctcagcgagactttctgagcccgagcccgatgataaataaagtagtgattcaagggttcagcccatgggttcgtcggagtgatgaataagatatccttgtctgactcacttgtttaaaacccatctctgccctgctgcacagggctgtatgtgcaagagaaggagccccgctaggggtgtttcatgactgttgttgctgggtgcctgagtttgctagggctgctgtaacagaaccgcacgctgggtggccagaacgacagaagtatattggcttgcagttctagaggccagacgtttaagatcacattcaagatcaaggtgttggcagggttcgtgccttcggagggctgtgagaatctgttccacgcctctctctgttggctcatacatagccgtcttcccctgggtcttcacatcgtcctccctctgtgcctgtctctgtgtccaaatttcctcttatgaggacagcagtcatatggaagggggcccaccctaatgacatcattttaactgaatcatccccataaagaccctgtctctaggcgaggcttggtggcacacgcctgtaatctcagccctttgggaggctgaggcaggaggatcacttgaggccaggagtttaagaccagcctggacaacatagcaagatcccatctctacaaaaaaatactaaaattagctagacatgatggtgaatgcctgtggtcccagcactttaagaagctgagacagacagatcgcttgagcctgggagtttgaggctacagtgagctatgatcatggcactgcattccagcctgggtgacagaacgacacccccatctcttaaaaaaaaaaaaaatcccaaatatactcatactctgaagttctgaggtttaggatttcaatatgtgaatatttctttgtggaggggagtggtggacacagctcagcccataatactgagaaaaggacaaattcaaattacatttttatttatttgtttatttattttgggggcgggggcagagtctcactctgtcacccaggctggggtgcagtgacgcgatctcagctcactgcaacctctgtctcccaggttcaagtgattctcctgcctcagcctcccgagtagctgggactacaggcgtgcgccaccacgcccagctactttttgtatttttagtagagatgggctttcattgtgttgaccaggctggtcttaaactcctgacatcaggtgatcagcccgctcggactcccaaagtgctgggataacagatgtgagccaccgtgcccggcctcaacttacatttttagataatataggaacctggagggaaatgatcgtgtcaatagagaataggtccattttgtctcttctcactcctttaaataaacactttaagggtgagcaggttggttggccacatcaattttggacgctccctgttttccagatctcacactcatacattcaggggtgactaaagagaggtgagaggcctggtgcagtggcttacgcctgtaatcccagcactttgggaggccgaggtgggaggatcacctaaggtcaggagtttgagaccagcctggccaacatgatgaaacccagtctctactaaaaatacaaaaattagctgggtgtagtggcacacacctgtaatcccagctgcttgggtggctgaggcagaagaattgcttgaacccaggaggcagaggttgcagtgagccgtgatcttgtgccactgcactccagcctgggcaagagagtaagatcccatctcaaaaaaaaaaaaaaaaaaaagaggcgaggacccagcccagggcggagtgggtcccatgggattttacaggggatgtgttgagggccaggtccacaaggctgcgtgtgcctggtggggaagcaggatgaagtttacaaacagggcatggggcgggggtatatctctgttctcagtattgccagggtcaggggcaaggaatatccaaaagtaactacactcttggacccaagtgaccttaggaccaactgctgtcacaagtgattgaacaaaagaagtttctggaaggtcttaaaatccttcagcaaaaaggaagtattggctgggagccaggctcagagctggcccttggggagactgaggagaacagaaatagccctcgcctctgttcagatgttcagccaggagtcacgagcatggaagtcaaattaacagcccagtggggtctgtgaaggtgccggcagcaggcgagcctgtgacgggagcctgcctggcctggggactcgcttatgggggaagtgggagacctgagagcttccccagtcagccgtgccctgggtcttctgcctgcgaggtgggcaccgctgcttcctcacgagtgaagtcacagcagcacagcagcagtgggaggctcaaggctttgctgtggatcttcctgggctcactgctcagagcatctccacgaggaggcgtctgccacctcctgcatcccattccagggcagacgagatcgggggcaggagggtgacatttgagattttgattcccagggtatgggtactcacgtggggctttaatttcctggtgaatgtgccatggggggcaaggggtagcttgcccactgcttgggaagacccctggggtccttgtcttgtcacgtggagatgctgtttattgggtaggcacaagaacaagagaggcggagaaagtgtgatcgtacttatttggcccataggtgccgtggaaactggttcctttcccctgggtggtccctcgggagtcaggcccatgatttagcagggaagggagaaggtaagggttggggtgtcctggagtgcagaaagtggcctgaaccggggcaggtacgtcctcaaggctggctccctcttgcactccgcactctcaatatcctgcagccaagtgagcgtggggttggaaccatgctaacatgtcaagtgcccgtgggtcctcgaggaggctgaaagtgtgtgaatcttgcttttttttttttttttttttttgagacagggtctcactctgtcacctaggataaagtgcagaggcatgatcttggctcactgcaggcttgacaacctccctgggctcaagtgatcgtcctacctcattctccctagtagcttgggactacaggctgtcaccaccacgccaggctaatttttgtattgtttatagagacagggtttcaccatgttgcctggtcttgaactcctgggctcaagtgatcacccgcctcagcctcccaaagtgctgggattacaggcgtgagccaccacgcccagccacttttctgattgatttaaagcatatcttctcagctgcagcattggtgacattgggggcagatcattctcttgggtagcagctgccgtctgcactgtagggtgttgaacagcatccccggcctccacccttcagatgccagtagcaccccctgctctgtgtctggataaccagaaatgtctccagacatggccaagtgtctcctggagggcagagtcagctctgggtgagaaacactagttccgggttctgttgactcctaagtgactttgcgtctgtcatcatctgactgaccgaagtcctaggatgctgccctcttttttttttttttttttgagactgagtttcgttcttgttgcccaggctggagtgcaatggcacggcctcggctcactgcagcctccacctcccagcttcaagttaccgattctcctgcctcagcctcccaagtaggtggggttacaggcacccgctaccacgcccagctaatttttatatttttagtagagatggaatttcaccatgttggccaggctggtcttgaattcgtgacctcaggtgatccacccacctcagcctcccaaggtgctgggattgcagatgtgagccaccatgcccagcccgcacatttaaatacacaaagtgaatggggaaggagagaggagagaaatcagagaggctaggtggattctcctggttaataaccctttgggttaataaccctttgggggccaagtgattacatgcctgtaatcccagcactttgggaggcggaggtgggaggatcccttgggcccaggacttccagaccagccttggcaacatagtgaatccccgtctctacaaaaaagatacaaaaattagccaggtatgttgacacatgcctgtggtcccagctactcaggaggctgaggccggaggatcacttgagcctgggaggttgaggctgcagtgagccaagatggtgccactgcactccagcctgggtgacagagtgagactcatctcaaaaaaaaaaaaaattattgggaatgtattctgtgtattctggtatttagtgtgaggaaagaatcaatttttttccaaataattaatgtagggtctctcaccctcagcactgctgatatttgtggctgggtccctctctgtggtgggaccctgagcaccacggggtgtggaccagcatttccagcctcaaccttcttcatgttggtagcatcctccctgtcccaacaacccttaatatgtctctgggccaggcgcagtggctcacatctgtaatcccaacactttgggaggctgaggcaggcagatcacttgaagctaggagtttgagaccagcctggccaacatggtgaaatcttgtgtctactaaaaatacaaaaaaaaaaaaaaagaaaaaaagaaaaacacacacacacacaaaattagccaggtatggtgtggtgcacctgtaatcccagctacttgggaggctgaggcaaaacaatcgcttgaacccgggaggtggaggttgcagtgagccaagatcatgccactgcactccagcctgggcaacagagcaagactctgtctcaaagggaaaaaaacatgtctcgggacagaggttgccaagtgtccctgaggacagagtcagctccaggggagaaacaatgatatagaagaacaccaagcttttgaggggcaagcagagcctgttgagacctacaggtcaagcccgtgactggcctgaggtgacttctttctcccctgcctttgtggtgtgatcaccagggtccctggcacagggatgagcttcaaggggagctggggagtggctgtttcaccgaagacactggtggcagcaaatcctgagaccattgtcccccaccatccagttccgctctcaggtgatcagaaaatggaacgagctccctgtgtcctttgtagaaaccaggcagagggtgggtttcatggccaggaggaggagcatctgtctgaaggccgcaagggctgggtcacagatgggcagcattgggagatcctggcaggcagagagcactccacgtggaaactagaagcatggggcagatggggggccaggtagcgagccacctaggcagctcagcagatgtggagaatgggaataaacttggggggtctttgggggaatcagtgggataggtgatagctaaaaggtacagggtttctttttaaggtgatgtaaatgttctagccaggggcagtggctcatgcctgtaattccagctctttgggaggctgaggcaggagaatcacttgagcccagaagtttgagactggcctgggcaacatagggagatcccgtctttaataaaaaaaaaaaaaaattgaaaaatttaccgaatgtggacttgcacctgtagtcccagctactccagaagctgaggtgggaggattacttgaacccaggagttcgagaccggcctgggcaacatagggagacccctgttcttaccctggggatggctttcctccgggcgtgacgacagatgagctgtgtgattgcacagcaggatacaagggtttttcctctgcccttccagacccgcgtccctggctgccctccctatcttcgttacaagcccacaggtcacccgagaaggacctgcagcccagccaccacccagtggctctgccttctacctgtgaccagaacccacctgtgtctcatgggcctgacccaggccactgtcagctcccgccaaggcacccacaggacgtgcttccaccaaggccccccagagtccatctgccacagatggtgacattttcttaatgtccctctggtcctggtgcccctgcatcaaaccacacggggctcccctgtcggacttgcatgaaaatctaaccacatttgcagggccctggaagatctgaccttccccatctcagcttctctctcccggcctccagccttggacccaccggccacactgggctccttgttctcagacccactctggccccgcctgcccattccccgccctcgcctgggctgctgtcctcaagctctgggcacgtccagctcgtttgcactgtacaggcctcagcaaccatttgccctgagcgccgccccacaggttcctatccccagcttccccaccttggcccggctcgtattggggccaattattttttgctgtgggggccgtgctgtgcactgtgggacactgagtggcattcctggcctccacctaccatttgcagtatcccctcgccacaagtggtaacttccaaaatgtctccatggccaggtgcaatggctcacgcctgtaattctaacactttgggaagctgaggcgggcagatcgcttgaggccaggagttcaagaccagcctggccaacatggagaaaccctgtctctactaaaaatacaaaaattagctgggtgtggtggcacacgcctgttgtcccagctactcgggaggctgaggcacgagaatcacttgaacctgggaggcagaggtaacagcgagctgagatagcgctactgcacttcagcctggaaaacagagcaagacttcgtctcaaaaaaaaaaaaagtctccagacattgtcagatgtctgtcccagcagggacagactcactgctggctgagaactgcagtgttagcacagttatgctggatttttcctccccaaagcacttatcactgttgctaatacctccttgctttgtggtgagtgtgttatccgtctccttcacctccccattctctctcctgtgcccagcatcagcctggcccggggtgagcactgaaggaacatttgttaaccatatgttgaaagaaggcagcctcctctgaaacatcagcacagatcacagggagggagaccccagggcctggaggggtgggcgtatagcacaggtcggagagcacttgggccacggggaggcgggtggccagaatgcgctgaaagaacacatacctgggaagggactttctccagggcgtggggtttagaacagtcaggccagatggaaggtctgggggaatgtcttggggaagacaagggacaaactgaacacgttcagaagaacacattcaactccccatgggtgagcgtggaattggcagaagtcacgagagagcatttgggatgagcttcttgggaatattcggctaaggcagaaaaaaggctggagcaaccgaagggctcacccagctaccttctggcctgagtgttccactcaaggtgttctgcactgggcaactggattcatgtcctggggcttccataactaagtacctatcctgggtggctgaggaggccacaagtctgaaatgaaggtgttggccaggcacggtgcctcacacctgtaatcacaatactttgggaggccgaggcgggtggatcacctgaagtcaagagttcacgaccagcctgactaatgtggtgaaaccctgtctctagtaaatacaaaaaaattagccaggtgtggtggtgcatgcctgtaatctgagctacttgggaggcggagacaggagaatcacttgtacctgggaggcggaggttgcagtgagccgagatcgcgccattgcactccaccgtgggcaacaagagcaaaactccgtctcaaaaaaaaaaaaaacgaaaattagccaggcgtggtggtgggtgcctgtcatcccagctactcgggaggctgaggcgggagaatagcttgaacccaggaggtggaggttgcagtgagccgagatcgcaccaccgcactccagcctgggcaacagagcaagagtccatctcaaaaaaggtgtcagcaggaccacactccctctggaggctctacgggaggacccttcctgcctgttctagcttctggggctccaggtgttccatggcctgtggccacatcactccaatccccacctccatctttattcacgtgccgccttctctctgtgtgcacatgtctcttttccttttataaggacgccagtctttggatttggggcccacccttgtccagtacaacctgatcttaactgactacatccccaaaggccttatttccaaacaaggtcacattctgaggttcgcggtaagcatgagttttggggagcacgaatgaactccccactggaaatgcctctctttgtaattttgccctgcggacgctgtttcttggccctgctggctcccccagctgctccccgaggagtttcccatccctgctctgtcccacccctaggacctggccccttagcagggcctgggccaccaatgatgcccaccaattcctgtgatgtcctgtaccagaccgtggtatgagcccattgacctctgcagtggattcttggaagcagccccacttactttgtttatttacttatttgtgtgtgtgtgagagagagagaaacaggatctgtctctgttgcccaggctggagtgcagtggcgccatcacggctcactgcagcctcgacctcccaggcttaagtgattctcccacctcagcctcctgagtacctgggaccacaggtgcatgccactatgcccggctcattttttattttttgtagaattggggggtctttctttgttgcccaggctggtctcaaactcctaggctcaagtagcctcccaaagtgctaggattacaggaataagccaccacgcctggccatatccccactttctgaaatgccccaaaagagcttagttcctccctcctgtcacctgcagtgggccatctcttggagttttcttaacaatttcttctcttgagtgtcctcttcctcccgactggcacgtgagcgtggccatcttatggttaggttgcaggtgtagaaaaatgaggacaaaggtctctaagtcgtcctcccactctgagccaccctgaccaataggctgactttgtggtcattccttcgtgtgtgtgtgtccatctttcccatactgcccatgagcgtttcttctaaaaaaaaaaaaaatcctcaacaggatcagggaaatgtacacaaaatgtgaaatgcactgaatgctgcacgatgcatcctaaatgagtctgctgtaatgctagttagccttcccttagcttgagaatgatttcatcctataaacatgtggcttcaaattatggccttatataaacgaaacggctacgccacactttctggaggccccgtccggaggcctttattctccagtaaattccgaatcctccgccaaactggtaggcagaaccctactttctgtgcagccggccttgagagcggctaattcacatccggccactgacccccacccccagggcctgttttttttcgttgtcatgcctttccttgcacctcctttctatgagaacacaaggaaaaggccctgaattgagattggcattttttcagagtgcagaaagcatatactggcctggttttacatagccatttctttttgcaccgctccgtttttttaaaaggagtgatcatttttattgtagtgaaatgcacataacgtgtaatttatcatgagtaacattcagtgcattcacagtgttgtgccaacaccagctctatctgattccagaacactttcattccccaaaaggaaaccccgtccccattagccatcactccccactcctcatcccctagctcctgacaacgactcatcactttctgtgtctgtggatttgtctgttctggcattctggacatttctataaatggagtcacaccccatatggtctttcgtgtctgacttctctcactcagcatcatgttttttagtttcatccacgttatagcatgaatcggtgcttccttcctttttttttttttttttttttttttttttttttttttttttttgagataaggtctggccctgttggccaagttggagtgcagtggcacaatcttggttcactgcagcctctgcctcccaggcccaagccatcttcccacctcagcctcctgagtagctgggattacaggcacacaccaccacacctggctaatttttgtgttgttttttttctgtagagacgaggtttcgccatgttcccgaggctggtcttgaactcatgagctcaagcggtctgccggccttggcctcgcaaagtgctgagattagaggcgtgagccgcctcactcagccttcattcctttttatggccaaataatattctgttggatgaatgggccacgttgtgtttttccatttatccgttgacaggcactttgttaccactttttggcatttcttcgaggatctttatagtctgacagtttgattttcatttggtgacaaggggattgttcttacacaaggccttggtcgtactgatgctgtcagctggaggatgtattttgcttcctgttcacattgtctgtgcgtgggatggtcatgagtcaggtggtagagcgggtgtgttagccttggggtattttggtgagacaattcggtttaaggaaggaaacacgttttcaggacccgtaccccaaaacacaaccataacccgaggtcgccacttggctgagctgtcccccacagggacttcaggtccctggttcctccatccccaatctgcttccttccattcccgccagaaccagggtattttccaagggcaggtttcacatccacttggggcagggatcttaagccacagtaagactaatttccaggtcccaggtctcctgggaaaccccaaaagactgagccctgccgagtgagaacattctctgaagctctgataatcaaaacagcgtggcacctcacaagcctcagcagcccagaggcggaccacatgtataaaataacgccatgtgtagtatttaacaaaggaggctccccaatccagggagggaaggattctttcacaaaaggcatgaaaacagttgcttccatgtttggaagcagttttgttttgttttttgtttgtttttttgatacatggtcttgctctgtggcccaggctggagtgcagtggcatgatcacagctcactgcagccttggcctcatgggctcaggcaatccccctgcctcggcctcccgagtagctgggattatagatgtgcaccaccacgcccagctaattttttaattttttatagagatggcgtcttgtggccaggcacagtggctcacacctgtaatcccagcactttgggaggccgaggtaggagggtcacttgaggtcaggagtttgagaccagcctggccaacatggtgaaaccccatctctactaaaaatacaaaaattagctgggtatggtagtgttcaggcccaggtatagggggtcagcccagagctgtgggtgaaaggacaggcccatggtcccacctgtgggagcaggagaggaccaggccgatgagccttgcagggggcacgccagcttgtggtcccagctagtttctgctcccaccacccccatcccactcccagggagggatgtcccttctagggctacccccttccctgcagccctggctgctcagcagccgccttgagcaagcccttatccacttcctcctggcctgggggcggggcacgcatctgccagtcctgtgaccgtccccttcagccccatctctgagagtggggtttcctgagagtctgcccttctgccccgcacaccaggggcccagagctgcagaagcccccacaggctttgttcccagcagggctcagagggctcctggtgctccatcagcagtccctggaggacacggagcagtctcaagtgcagccgtccatgtggccttcagcccttgtgattccatgagctagcatcagccgtcccctcagtgggtggcagaggctgccgggagcagaagaaagagcccatccttgggttctcctggcttctcgctcagagctgctctctgctgtgaaggaggaagtaggcatatcccagtgagttttgcgtcgcctacatccaggcagctcagccataagtcagcccaaagcccgccagctgggagctgcactgagcccctggtcacaaaagtgaacgtcacaggacgggccaactctgcccaggcctcgctgtgtgcacatacacaggtgtacgcatgtatgtaggcatgaacatgtgggtggacatgtgcatgcaagtgttttgtgtacaagcatatacgtgtggctgggcacatgtgtgtgcatgagtgttcatatggaagtatatgctgggcgaggcggctggatcacttgaggctagaagttggagaccagcctggccaacatggcaaagccctgtctctattaaaagtacaaaaattagccagacgtggtgatgcacgcctatatcccagctacatgggaggctgaagcacgagaatctcttgaacccagtaggcagaggttgcagtgagctgagatcgcaccgctgcattccagcctgggtgacagagcaaggctccgtcaaaaaaaaaaaaaaaaaaaaagcgcttgcacatatgttttttcatacctgtgtccttgtatgcatgtgcatgcatgtgagtgtgtatacaagcatatgactatgtgtacaagcatgtgtgtgcatagtgtgtccatgtgtgtgctgtgtttatatgagcatgggtgtgtcctatgttgtgttcacagaggtgtgttcatgtttgtatactgtatgcacagaagtgtgtgtattcacatgtgtttcctctgtgtacatgcaagcacatggaagtacatatgccagtgcacacacacattcatgcatgtgtgattaagacatgtatcttggccaggcactgtggctcacacctgtaatcctggcactttgggaggctgaggtgggcggatcacctgaggtcaggagttggagaccagcctgaccaacatggtgaaaccctgtctcaaccaaaaatacaaaaaattagctgggcgtggtggtgcacgcctgtaatcccaactacttgggaggctgaggcaggaaaatggcttgaacctggaggcagaggtgcagtgagccaagatcgtgccactgcactccagcctgggcaacaagagtgaaactcccatttcaaaaaaaaaaaaagaaaaagacatatatcttcggtttgggctcctgtattccttacctggattagaagtgcgtaaacctctgtccatcttccttggccctgtggagctgcctgggaacattccatgattaactctcgtggcgtcctgggacgaccaggtgagcgataccatgtggcacctgggaacctgacgtacctttagatttccgaccatctccctgctgtggtgtctgaggaactgtgcctgggctcaagggctgaacttttgaatacagagtaagaagttttagaaagataaactcctggggaaatgggatcttttaaatccatgtaatttttaaagcagtttttttgcggggggtgggggggggggtggtttgagataggttcttgccctgtggcccaggctgcggtgcagtagtgcagtcactgctcactgcagcctccacccgctgggctcaagtagtcctgccacctcagcctcccaagtagctgggactaaaggtgtgtgccactatgcccagctaatttatttatttatttatttatttatttatttatttactttgtagagttacctagttgtgtggcccaggctggtgtcaaattccttggctcaagcaatctgccctcctcagcctcccaaagtgctaggattgtaggcatgagccactgcagctggctttgttgttgttgttgttgttgttgttgttgttgttgttaagacggagttttgctctgttccccgggctggagtgcaatggcgcaatctcggcacactgcaatctccacctcccgagttcaagggattctcctgcctcagcctcccgagtagctgggattacaggcatgcgccaccatgcctggctaattttgtatttttagtagagacgggatttctccatgttggtcaggctggtctcgaactcccaacctcaggtgatctgcccaccttggcctctcaaagtactggaattacaggcgtgagccaccacgctcggccaagcacctggcctttttaagcagttttatccaggtgaaattgttgcataataggctgcacttactcagtgtgccaacagccatgagcccaccaccacgaccaatgccataaacacatccatcatctgaaaagtgtcctcaggcctcttggcatccctccccactccacatccccaagcagccaccgatcagctttctgtcttcataggtcaatttgcattttctagaatgttatatacatggaatcatacagtataggctctttttaaaacttaattaaggaaaagtcacaaaaggtaaaattcaccatctaaagtgtgtaatttggctgggtgtggtagcttaaacctgtaatcccagcactttgggaggctgatacaggcagaatgcttgagcccaggagtttgagaccagcctgggcaacatgatgaaacccagtctctactaaaaatacaaaaattaggcaggcgtggtggcatgtgcctgtagtcccagctgctcaggaggctgaggtgagaggtttgcttgagccaggggaggttgagactgcagtgagccacaattgcaccactggactccagcctgggcaacagaatgagatccagtctcaaaaataaaaatttggccaggcgcagtggctcatgcctgtaattccagcactttgggaggctgaggtgggcagatcacttgaagtcaggagttccagaccagcctggccaacatggcgaaactctgtctctaccaaaaatagaaaaattagctcggtgtggtggcggatgcctgtaatcccctgagattggaagggaggctgaggcaggagaatcgcttgaacccaggacgtgaaggttacagtgagccagggtcgcagcactgcaatggagtgcaagactgtgtctcaaaaaagaaaaaaaaattaagtgtgctagtcagtgcattcaccgtgttgtgcaacgaccagctctatctgattccagaacattttcatccccttaaaaggaaacgcggtccccatgagcagtcactccctattccccctcccggagtccctggcaaccaccaatctgcttcctgtctctatggatttgcctgttctggacatttcatatcaatggaatcatacaccatgtggcttttttgcgtctggcttctctcagcttcatgtttttggggttcatccatgttgtagcacggagcagtggttccttcctttttatggctgaatcatactccgttgtgtggatggaccacgttttgtgtatgcattcatctgccgatggacatggggttgtttccacctttcggctattgtgaatagagctgcagtggacattggtgtacaaggaattgagtcgctgctttctattcttttgggtctatacctgggagcagaattgctacgtctgtatgtagttatgtaatctcttttgtcaggcttcttcttttttttgagacggagtctcgctctttcacccaggctggagtgcagtggcgcgatctaggctcagtgcaagctccgcctcctggattcacaccattctcccgcctcagcctcctaagtagctgggactacatgcgcccccccaccacgcctggcgaatttttttttggttttgtatttttagtagagaaggggtttcaccgtgttagccggaatggtctcgatctcctgacctcatgatctgcccgcctcggcctcccaaaatgctgggattacaggcataagccaccgcactggccttgtcaggcttctttcactcagcccaacaattctgaattggtttcctatcactgtgagcatcaggaaccagccatcctgaactcgttggttccttctcattgttgaaccatattccatggtgtggtcagtgtgttcattcggtgggtggacatttgggttctcagtttgggactctcagaagttacacgtctctgtctcgacatctgcttcatttctcctgagtaactcctgagaggggaattgcagggtcacgtgctaggtatgtgttttaacattgaaagaaactgctgaagtgttttctaaagcagatgagggccaggcacagtggctcatgcctgtaatcccaggactttgggaggtcaaggcaggtggagttccagaccagcctgggcaacatggcaaaaccccctctctgcaaaaaaaaaaatacaaaaattagctgggcatggtggtacagtcagaggatcacttgagcccaggaggtcgaggctgcagtgagctgagatcatgccactgcattccagactgagtgacagagtgagaccctgtctcaaaaaataaaaaagcagatgagctgcctcgttcagatagtttgttgttgttgttgttgttgttgttgttgttgttgttgttggttttttttttttttttggagacggagtctcgctctgtcgcccaggctggagtgcagtggcatgatctcagctcactgcaagctccgccttccgggttcacgccattctcctgcctcagcctcccgagtagctgggactacaggcgcccgccactgcgcccagctaattttttgtatttttagtagagatggggtttcaccatggtctcgatctgacctcgtgatccgcccgcctctgcttcccaaaatgctgggattacaggcgtgagccaccacgcccggcctgttgttgctgtttttaagaaatagagtctctgccaggtgtggtggctcacgcttgtaaatcccagcactttgggaggccgaggcgggtggatcacttgaagtcaggagttcgagaccagcctagtcaacatggctgtctctactaaaacagagaaacactgtctctactaaaaacacaaaattagccgggcatggtggtgggcccctgtaatcccagctactcaggaggctgaggcagtagagttggttcagcccaacaggcggaggttgcagtgagccaagatcacagcactgtgctctagcctgggtgataaagcgagactccatttcaaaaaaattaaaaaaaaaaaaacagcatctcgccctgttgctcaagctgtatcttagatagtaaaaataaaaataaaaataaaaataaaccaggctctcaaagctttatctcatgacctggaggaacatacaaatgcactgacatatcaaggaaagaattaggttttacagctaaatggataagacaatccaaaatttattaaactatacagtatatatctatttccctgggagaaaacatgacagttacttactaacctgggggaaagttttaagagttaaatcttgtgtgtcccccagccttcttccctgtcgccactccctatccctgtgtgaactgttgcctcggcctcataagttatcgtttctttcagcctcagcccttctaacacttctgcaggaattctcagagcctctagtggccctgaccccactcagtcacagtgctgagtcatgcttctctttagggcagaggtcagcaaacctttgctttgaagggctggatagtaaatattttaggctttccaggctgtaatattacagtctgtgcctgaactatttcactctgctcttgtagcaaaagcagccacagacaataaggaaaggagtgtgggcaaggctgccttccagtaaaactttatttataaaaacaggtggtgggcctattgtaccatcctttattcttctactcacctcgtgaacgaactcctcttcatccttcagaaccccccccccccaccttttttttcttcacgatggagtctcactctgtcgcccaggccagaatgcagtggcatgattgcggctcgctacaaccttcacctcccagattcaagcgattctcctgcctcagcctcccaagtagctgggattacaggcacccaccaccgtgcccggctaatttttgtatttttagtacagacagggtttcaccatgttggtcaggctggtcttgaactcctgacctcaagcagtccacccgccttggcctcccaaagtgctcggattacaagcgtgagcgaccgcgcctggtcttagaacccctcttagatattcctactcccctaatgtcttctcttgtcctttaggataatcactcctgctgtgtgtcttttaactgctgcgctggattcacgtctacactcacgtctgtttgcataccagtctctcctgcctggctttgggcctcatcttcacaccctcagccattcttggttgactcatgccgcatttatggctcttgatccaagcccctaggtgggctggcaccagcatttctttttcttgcaaccttcagaagcaaatgcactttttaggaataaacttggccgggcacagtcactcatccctataatctcagcactctagggggcctaggcaggtggatcatttgagcccaggagtttgacaacaacctgggcaatatagtgaggcccccatctctacagaaaatacagaaacattagccagcatgcatcgtggtgtgcacctatagtcccagctacttgtgaggcagaggtgagaggatcacatgagcccagggagatcaagtctgcagtgagccgtgatcatgccaatgcaccccagcctgggaagtagagcaagaccctgacaaaaaaaaaaaaaagaagaagaaactgggcgaccctctctcttaggaaaaaaaaaaaaaagggctaggtgcagtggctcacacctgtaatcccagcactttgggaagccgaagtgggtggatcacaaggtcaagagattgagaccatcctggccaacatggtgaaaccccgtctctactaaaaatacaaaaattagttgggcatggtggtgggcgcctgtagtcccagctactcgggaggctgaggcaggagaatcacttgaacccgggaggcagaggttgcagtgagccgagatccgccactggactccagcatggtgatagagtgagactccatctcaagaaaaaaaaaaaaatgaagagggtgaattttggggagctaaacaatctatatacgtggacataacagagcagaatagttattggggactgcagaaggtgatggggggaggagggtgagggtgaacaaatttcccgttgggtacgatgttcactattcaggcaatgtgtatcccaaaagcccagattggcctggcgcagtggctcactcctgtaatcctagcactttgggaggccaaggcgggaggatcgtttgagcttaggagttcaaggccacctagccaacataatgagagcactttggaagcccgaagcgggtggatcacgaggtcaggagatagagaccatcctggctaacatggtgaaactccatctctactaaaaatacaaaaaaaaattagccaggcgcggtggcgggcgcctgttgtctcagctactcgagaggctgaggcaggagaatggcgtgaacccgggaggcggagcttgcagtgagccaagatagcgccactgcagtccggcctgggtgaaaaagcgagactgtcttaaaaaaaaaaaaaaaaaaaaggccgggtgcggtagctcatgtctgtaatcccagcactttgggaggccgaggaggatggatcacctgaggtcaggagttcgagaccagcctggccaacatagtgaaaccctgtctatgctaaaaatacaaaaaaaattagccgggcgtggtggcggggtgcctgtaatcccagctacttgggaggctgagacaggagaatcgcttgaacccaggaggtggaggttgcagtgagccgacatcatgccactgcactagagcctgggcaacaaagagcgaaactccatctcaaaaaaaaaaaagcccagacttcaccactacacgatatatgtgtataagaaacctgcacttgtaggccaggcgtggtggctcacccctctaatcccagcacttagggaagtcgaggttggcacatcacctgaggtcaggagtttgagaccagcctggccaacatggcaaaaccccatctctacttaaaaaaatacaaaaattagccgggtgtggtggcgcatgcctatagtcccagctactcaggaggctgaggcagaagaattgcttgaacccaggcagcagaggttgcagtgagccgagatcacaccactgcactctagcctgggcgacagcacgagactcttatctcaaaaacaaaaaaagaaaaagaaaagaaattggtattggcagactgctacttaccaccttcctggtgtgcttctggtgtcactagctcttccattcaagccctctctctggtagaggatcctttccagggagtcctatcgcattgagaatctcctgtggtcttggacagctagctcctcagtctttccttgttgcccgtgaccttggcagtcttgggaccaccagccatattcctgcaggatgcccccagcctgggcctgcctgatgttcttctccccagtagtctggagttgtggcttcagaagcaaccacactctaggccattcccgagtgcatttttcgtggctctcccggacttcatcttcctaggttgggtttcaaggaccctggagttttgggaatcccaaatttcaggacaggttcagtcttgctcatccccacatgcctctcgctgttactgctgtgtggccaaggcctgtggggccgagtcgtcttctgcttggggagctgctggggaggtttattcagagatgaggtcaggaaggatgtgggctgggaagggcatagcagaaagagggtcatggcttgttgggcttcaggattgagaggctgcctctggatggggtgggatgggggctgggatggagcaaactcaggggaagggtcaggtcttggggttgtctgatgatgtcacttgtaaaagccactgtatttttttttaagtgacagggtctctctctctcacccaggctggagcacagctggtataatcatggctcactgcagcctcgatctcctgggttcaagtgatcctcccatctcagcctcctgaggagctgggaccacaggcgagcaccactatgcctttattttttgtagagacggggtctcgctatgttgcccaggctggtctcaaactcctggcctcaagcgatcctcccaccttggcctcctaaagtgttgggattataagcatgagccactgcaggagcctgaggtcacattgaaggacagacagaccctcacgggatgtcgtgactggttgcctctggctttttgggcgagcctagtcgggtggggaactccagcatcgggtcaggtgctatctgcccaggagtgggactccacatgccccttaaacttcctcccaccattctgaccatgcctggctctgacctcccttctagctccaggacacgcgcgccccgagcctgggaggcatgctgaagccaggcggccggcaggatgagtgtgaaagaggcaggcagctcgggccgccgggagcaggcggcctaccacctgcacatctacccccagctgtccaccaccgagagccaggcctcgtgccgcgtgactgccaccaaggacagcaccacctcggacgtcatcaaggacgccattgccagcctgcggctggacggcaccaaatgttatgtgctggtggaggtcaaagagtcgggaggcgaggaatgggtgctggacgccaacgactcgcctgtgcaccgggtgctgctatggccccggcgggcacaggacgagcaccctcaggaggatggctactacttcctgctgcaggagcgcaacgcagatggaaccatcaagtacgtgcatatgcagctggtggcgcaggccacagccacccggcgcctagtggagcgtggcctcctgccacggcagcaggcggactttgatgacctgtgtaacctccccgagctaaccgagggcaacctcctgaagaacctcaagcaccgcttcctgcaacaaaagatctacacgtacgcggggagcatcctggtggccatcaacccctttaagttcctgcccatctacaaccccaagtacgtgaagatgtatgagaaccagcagctgggcaagctggagccacacgtcttcgcgctggccgacgtggcctactacaccatgctcaggaagcgcgtgaaccagtgcatcgtgatctcgggtgagagcggctccggcaagacccagagcaccaacttcctcatccactgcctcaccgccctcagccagaagggctacgccagcggcgtcgagaggaccatcctgggtgctggccctgtgctggaggtgagcggggaagctggtcggtctgtgggagggggcatttgtttggaaaatgcgggtttcaggccaagctcggtggcccacatctataatcccaatgctttggaaggctgagggaggaggattgcttgagcccaggagttcaagatcagcctgggcaacatagcaagatcttttctctacaaaaaaaaaaaaataattagccaggcaggcatagtagtgctcacctgtagtcccagctgctcaggaggctgaggcaggaggatcacttgagcccaggagttcgaggcttcagtgagctatgatcatgccactgcactccagcctggatgacagagagagactccatctcaaaaaaaaaaaaagaaagaaatttcaggctgggtgtggtggctcatgtctataaccccagtggtttttgagaggctgaggcaagaggatcgcttgagcccaggaattcaacatcagcctggtcaacacagcaaggccccctctctacaaaaaaaaaaaaaaaaagattaccgaagtgcggtggcacacatttgttgtcccagctattggagaggctaaggcgggaggatcgcttgagcccacgagttggagctatgattgcactactgcactccagcctgggcaacagagacagaccctgcctctaaagagagaaaaagtggaggttttctgattgttgttattattcaggtactgcgaagccaactggtcaggatgcaactgcctcttggaaagagagtttgttactcacagttcccgaaagaagaggatgcaatgccatggaaggccacagggggaagcactgggactcatcaggaggctgagggagagagggaaaaagggagcggggagaggcaggaaactttattgtgattttcatgcatcagaatgtgctaggcagagtaagctggcttaggattggcttgtttgaattatttcaatgggctctggggcataggggctgccccttgttgtcaggtgccagggcctggggtgatgagggcaggggatagtgggctggagtgtgagagtcccagagaggaggtggctggggtgtaggctctggactggttggtttgcatatggaaggcaagtcccaaaccatctctaggaactggctagaatcaatctaggaattgggaagggccgtctccctggggtcagccaggccccagatgtcagagcatcagaaatacagaaaataagtcactgggcgcggtggctcacacctgtaatcccaacactttgggaggctgaggcaggtggatcacgggaggtcaggactttgagaccagcctggccaacatgatgaaacctcgtttctactaaaaatataaaaattagccaggcatgatggtgtgtgcctgtaatcccagctactcgggaggctgaggcaggagaatcgcttgaacccggtaggtggaggttgcagtgagccaagatcgcttcactgcactccagcctgggtgacagagcgaaactccatctcaaaaaaaaaaaaaaaatagtcacagttaatacacatttggcttccagaacatggccattcattctcaaggtgcctgaaagaaaaggctggtgtattcaaaccagtttgaggagtgcttcacaacgggacatttctagggggaccagcagggtggaaggaagccagcaaggcgtacggcaggcctgggggttaaggggatggcgaagcattgtcggggagggggctgcctagtttcactgtagaggcagcagagaagggaccaacccaggctcttatgcctcatgccctctgcccactgttcattgccctgatcagccaaaccccacaggagccctcgatgtgccactgtgggtgagtcttgtggccacagggctacagaggtgaccacacagcacccatcattgcagggattgtaggacaaggtgcatccacatgtctcagaacaacgcaaccatcgccacctggtgagggccaggggcagcgtgtggcctcaggggtctgcacctctgggtgtgggatctgcctttttttcatttttattttattttttgtagagatgggggtctcactgtattccccaggctggtctcgaactcctggatgccaatgatcctcccaccttggcctcccaaaatgctgggattataggcgtgaaccactgtacccagctccgcttaaaaaaaaaacaaaaaaacagattggttgttttagagcagttttaggtttataaaaataccgagcagatagtgcagagagttcccatgtacccctcccacgcccaggttctcacattatttatattttgcattcgtgtggtgtgttggttgcacctgactcaactctacgttggtactgttactaacagccatagtttccattagggttcttggtgttgcacattctttgagtttggacaaaagtataatgaatgtgtctgccgttggagtgtcacagagtggtgtcactgccctaaaattcctccatgctccccctgttcatccctccatgacctttggcagccacagctcttctcactgcctccacagttctgtcttttccaggctgtctgtagttggagtcccagtgttgcaggcttttcagactggcttcttccacttcacaaccagcatttaaggttcctgcatgtcagttgggcacggtggcttacataatcccagtgcactgggaggccgaggcaggaggatcacttgagcccaggagttccagatcagcctgggcaacataacaagaccctgtctctaccaaaaaaaaaaaaaaaaaaaaaaaaaattagccaggtgtggtggtgtttgcctgtggtcccccctacgtgggagtctgaggcaggagaatcgcttgagcccgggaggttgaggctgcagtgagccaacgtctggccactgcactccagcctaggtgacagagcgagaccctgtcccccaaaaaaaggggagaggagattcctccatgtcttttcgtggcttgagagctcatttcttttgctgaattgtagctcattatatgaatgtgtcagtttcttcacacgtaggatcctgagagccccctcagtggagagagggagttgggggcagggtcagaccccaccctttctggagccttgacctctcgcctcttgttagtccccacaagctgagggctgccatgcaaattcactgaaatcacatctaagcagtgcctaggaatacatttcagttcctcttcctctctgaggtcatcagtaagacattaattggggtcatacaacttagccctggtccgacatatgtagcctattcctgttttctcctgtgcaagtaacacagagattcattgtcattgtttacatcagcttttaataaaactgctgagcaatttcaccatagaatgtccattttctttcctttcccatcccctcccctcccctcctctcccctcccctctcctcgcctctcctctattcctttcttgtcagggtctctctccgttacctagaatggagtgcagtggcacaatcataactcaccgcagcctcgagaacttctgggctcaagcgatcctcccacccaagtagctggaattccaggtgtgcaccaccatgcccggctaatttttaaattttctgtagagacacagtcttactatgttctccaggctggtctcgaactcctggcttccagtgatcctcccacctcagctgtttttaatatggcttgtcttgtgtgcattacattatatacccagaccgcccgttcattgctgtgtgagcatttgctgtgtggcaggctatgatataggtgctgggctatgtggtggccaaagtcaacacaaaattctccccaggtagaactcggggaagactctgggtgacacaggagctatagaggttctgagcagaggtagatgcaacccagctctggtctcccgaggccgccctggcgtcatcccagctctgagactcagccacagtgaaactgccagtggccccagtgtcctcccagcaggtggccagggggctcaacggctctccaggccaaaacatcagtgcctggcatccacacccgagataaaacagtgatcttgaaaattcagcatgtgtggcacacacctgtaatcccagagtcaggaggctgagtcctgagtcaggaggattgcgtgagcctaggaattccagaccagcctgggtaacattgcaagaccccatctctaccaaaaagtttaaaaactaggctgggtgcagtggctcatgcctgtaatcccaacactttgggaggccaaggcaggtggatcacctgaggtcaagagttcgagaccagcctggcaaacatggtgaaaccccgtctctactaaaaatacaaaaattagccaggtgtggtggcgagcgcctataatcccaggtacttcggaggctgaggcaggagaatggcttgaacttgggaggtggaggttgcagtgagccaatatcgcaccattgcactccagcctgggcaacaagagcgaaatctgtctcaaaattaaaaataaaaataaaaaattagccaggcatggcagtgcatgcctgtggtctcagctctcaggagcttgaagtgggaggattgcttgagcccagaagttcaagactgcagtgagctgtgatcacacactgcactccagcctgggtgacagagcaagaccctgtctcaaaaaaataacaaaaaaaatttagtaggtgaatgaatgagagggtagatccaacatttaccatgtcagacattttgccaaatgggactaggcaggtgggtaaatgcctgagccccgcagaaatgacacgcccagccccagggtctcaaagtggcacggccaggaggcaggattgccacctaggtctcagttcagggtccatgtcctccccaccacgttgctgcctccacagcgccatctcactaggaccctccagggcgtggacaagtttcctgttgctaagtgttaggggcaagggagtctccaacaacagggattaaggctctcatggtcctggaggccagaagtctgaaatcaaggtgtccacggggccgcactccctcccggctctgggggaggatgcttcaggcctcttcagcttctctggtggctgcagatgtgccctggcctgtggccacgtcacatcagtctctgcctctgtcgtcaggggcgttcttcctgtgtgtccatgtcttcacgtggctttcttataacaaggacaccactcatgggatgtagggcccatcctaccccggcatgacctcatcctacctaattgcatttgcaaagaccctatttccaaataaggtcacatacacagtttctgggggtgaggatgtggatataattttgggggcggggggctcaagtcagcccacagcatcccccatacagccccacctggtctgcttcaagtcctacctggcccctggcaagtcccacttggtgacatcttgtgcctgggtccttgagggctgccccagatccgcgattgtcctggggaccggtagttcctccccggatgccagcaaagctccctccagcctccacgcctgcacagtctccagtatgccttcaacagccattagtcaccctctgtgagtcagacccccggtcctgccaggccaacctgcttggggcctcagcagcgggggctggcgaggccagttttctccagcggttctaagccgctcgagggtggtgcccacgccggcttccaaaacaggcttgagccaaatccacgtcatggcaataaacgtgcttcctggggcgactgtttgcaaagggatgtgattgtcttcactgagagctggatttctcaacctggctctgctgacattcagggccggatcgttctctggggagggagtcatcctgtgcattgaaggacattgagcagcatccctggcctccacccaccagatgccaggagcactccccaccccgcaggtgtgacacccagaagtgtccccagacatttcattgattagagaggtattaacaaaatagcttcccgttgtcccctggggacaaatcaccccctgggaatagaacagctgtctttgagttcttcccataagacccaatcactgttcattgcagccactgagcttttagaaattatctgtgagttctttctgttctgtgctaacttaagagtcattttctttttttctttttttgagatagagtcttgctctatcgcccaggctggagtgcagtggcacgatctcggctcactggaacctctgcctcctgggtttgattctcctgcctcagccctcccgagtagctgggactacaggcgcccaccaccgtgcccggctaatgtttgtatttttagtagagacgggtttcaccatagtggccaggctggtctcaaactcctgacctcaagtaatctgccctcctcagcctcccaaagtgctgggattataggcgtgagccaccatgcctggccccaagaatcttttttttaattttatttatttatttatttatttatttatttatttatttatttatttattttgaaacagagtttctctctgtctccgggctggagtgcagtggcgcgatctcggctcactgcaagttctgcctcccgggttcgtgccattctcctgcctcagcctcctgagtagctgggactacaggtgctcaccaccacacccagctaattttttgtatttttagtagagatggggtttcaccgtgttagccagaatggtctcgatctcctgacctcgtggtccgcccacctcagcctcccaaagtgctgggattacaagcatgagccactgcgcccggccatcattttctaataagaggaataagacctcaggcccactgggtatcagggtttgggcttcgtgattttcctccatcatctctaatccctcacggcagctctgcccattttaaagatgaggaaactgagccccagagagacacgtggatgtgtgagtttcctgaggtgtctataacaaagtattacgggctgggagccctcaaacagcaggggttgattctctcacagttctggaggccagaagttgaaaatcaaggtgtgggcagggctgggtccctctggaggctctgagggagaatctgtcccaggcctctctcccgggttctggtggcttcagccatccttggagctctgggcttgtggccgcatcactctgccctctccctccgtcgtcacctggtcttctcccctgtgtgtgtccaatctcccttgcctttctctcatgggatcacctcatctcaaaatacttaccttcatgacatctgccaagaccccgtttccagataaagccacagtcacaggttctgggggtaaggacttagacatgtcttttttgggaagccacaagtcaacccactgcaggtagattccccaggccacaccgcagagagccaaagcctaacccggggtttgaacccggcctgagccccagccccccgttcaggctgcctctctgctctcccctctctcgcccgggctgcagaaagccggagatcagcacaactcgctgcatcgattggggattttttctcagctccccgaaaggagaagttgagctgttttgaggtttgagtgtcgctggatgcaccccctgacccccgccccccgcgagggttgcagcctcgctgtgtaatgctgaccaaaaaacaggaagggagcactgtggaaagccggttccaatcagctgatctgcccgccactgcagttaactgttgccatcacctttcaccaagtctaggggctgcagaagccatgagtctccccatcttccacatggcctctagcctcccagtgcaggcgcccgtcgacagcccaggggctgtggatagagcaccttacagcatcggccatggggtctcgccgcaaagcacacccagaacacgctcctctccctttgcccacagcctcagatccaccaggcactcgcctcggtgcccttctgagagcaggctgagtccagggggccaaaggctggggttcccttcatctgtcctgaactgtagcaagtgcagctggcagctggcagcgtgcatggggttttcattctgaaagcagaaataaaataaggatccttgcttgtcaggctgttgtcccaagggtccctggactccatggagcccctgtggcccggcccacagtgggacacggtgacagtgatgggctgcagggcgcagagggacgcccccagctggtggagccaagctcacccgaagttgtgccgatgcccaggacattccagtgagggactgaggaagggtcctgaacgtgccactgccccagacccccctcttggggcaaaggaacctaggactcgtacccacctggaccgggtcctgagctcctccttaggggccctacaaacccagtctcatgtttcccccaactcccccagcccctctgccatcagccaggccactagctctgttcccccacccacagtcagcactggggtaggtcacctagaccacagtgccattatccacttcgacctctgccctcaaggacacctgcctgggccacgtcctttccccctgagtctgtcgggcaagacacagttggatgccagcctccacccagcattgggggcgtcatctcatacgtcctcaccacatcctgatgtgggcagactgaccacccccacctgacatgtgaggaaactgaggcacacgagctgctcagcaagggtggcagagatagaagtttctggaaccaggtgtgtgtcaactctcatgcctctgaagttgaggttcctgtttaagagcttatggagatataatttacctatttacttatttataaatagataccttatatttatatctacagtttataaatatatagattaaattgtatctgcattttataaatgtataaattatatctgcagtttataaatctgtaaattaaattatatctgcagcctcaaattcctggcctcaagtgatcctcccacctcagcctctcaagcagctgagaatacaggtgcacaccaccacccctggctaatttttttattttttgtagagacagggttttgttatgtcaccaaggctggtctccaactcctggcctcaggcaaaagtgtgcaattcagtggcatttagtacactcgcagtggtatgcaaccgtcgcctctatgcagttccagaacatttccatccccctgaaaggagaccccgtccccatcagcattcactccccacttccctctcccaggccctggcagccactaacctgcttcctgtctctatggatctgcctgttctggacatttcagatcaatggaatctctcacactctgtggccttttgtgtctggcttctctcacttggtatcatgttcttgagattcatacacgtcgtagcatggatcagtgcttccttccttttcatggctgcatcatattccacggtatggatggaggatggaccataatttgtttctctgcccaccagttgtatcagcatttcattcctttgtatggctggtatgtggttggggttttcctggacccctgccccagccaggccaacctcccccatcagtgtcccccacaagaacaatgttggggagtggggggattgacactcacacagaggatcccctggagactgtcatgagccctgggaaggaggagagcagtcctctccagcaggctgcttcgggcgtgctaatggctggagccaccgagggacaccaggtgggaccaggagccggggtgggaggaagcaagaagggggcaggcgtgcccaggtatagcagggacgtccaggtacagcagggacatccatctgcacgttcttcccagcctgctgagaagccagtggccagagggaggctggcttcagggagcagggcggacgggccggctggcgggggccctggactcgggcaggagcgtttgcacgtggcttcccaagtgcgacagagagggagtcctgggagcaaccccagccgcggggatgtgccagatctgaggctgatagctgaggacggacaggtcccaagggaggaggagagggggtcagagatggctgcaggggaactgcccggaggccagtcctggtgaatttggtttggggtgcttcgttcaagcagctgatggggcatccaagggagaattgtgcaccagccacacaaagaatcccgcagccccagggctcatcaggcctcagaggccatcctgtcgcatgacccagtcagagaggggtcagggacagacagcaagctggggcacctcccagccaggcactcacccagcccttggctgttggccatacagggaggtgagtttgtcaggagaggtaagtgttgagagggggcgtgtggctcccctctcattggggggcatttcagggatgagattcagggcataggccacagaccggaggaggctcagggtcaggacggggccaaggcctcagaaggcagaagtcacccatgtcacgaggagcaaagggaagccagcatttgtttgaggaagagcaatacctgcagtcagcacccgtctgtctgtcaaagggtccaggagcccccactggcttgagttgtgtctatgttacatgaatgcagaggtatttgaggctgagggtctctgagaccacttgtcactttgctgggctgagggagaaggaaggtggggcgtcagtgggcagcagggtgggcagcaagcttgggctcaggagggtccggggcagcagcctggtgcacttcaaagggagattggaaggccagcgtgtccagggccgggttggggaagcagggccagggtcattgggtgcccgtcctcctctcgggtaggcgcactgctgtggtggggaaagaggaggcagaattagggctctcaggagtttcccccctgctcgccctgcgagcggtcaagactcaggctagcccaggccatccgaaaggctaaacagcgggatggttatccacacaaacatctaggtcacccatccacacaggcaggcgtgtgtggaagacagggtggtgcaaggacagaaggaggaggtacaatgtggccctgaccgcaagctactgaaggtccctgaggggggtgagctgggcaccccgggcaccacaggaagcgaagatagaatcaatctctggctgcctctcctgtgtggcctccccgggatgtttgcacaaaggtagggggaagcagtttttgggggccctgggtctgcagagcagcccagaggaggagataggagctggggcccgaatgcagggcaggcaggagacggggcagggcaaaccccagaggcgacgagaaagcagaataagccatcatatagggtcagttttagacctcacagtcagaaacccttggggacagaggccaggcttcctggtccaacccaagttcccaacccctgccctgttgatatgtgggctggatcattccgttatggccaggccatcctgtgcatcatgggggactgagcagcatcctgatccctgcccactagttgcccatagcacccccgcccctagtcccgacaaccagaaacgtctccagatgttgacaggtgttccctgaggagcagaaccaccccccagttgagaactgctgttttaggccaactgtatgacaagatagatttcattgtaacagatggtctctgcctaaatatttgtagattctttttttcttggtaacattgtgccattggagttacacatcaacccgaccaaattcggcacgattgtggagtggctgttgggcgtggcgggaagcagtttcagtccggcgttctccctcgtcccttgggggaggtgactggtgtgcctcctcacctctcactcattgcccacccagagcccaggggacggtcactgctcacccacgatcaggcatgtcctcgtgtcaccgatgatgaagcggccctaggtgcgtgaggatctggctttccaagagcctgctcttccaggtgcactgagtgacgtcttacaatgttgtttgtaagacttgctccccatgccaaaaaccgcagtccctgattttaggacttccgcctgcactgagaagtaacatgctccctgctggggttttttgcaaaggaatgtaatcaaagaggtttgccggttttctgatccaggagagtgctggtttgtgcgccctggattctgtggtcctccctgtcctcctggggtgacttcttgaaacctatgccaggtgctggctgtggctcaggtctcgctcctttaagcatctccccagcaggaaacaagtcaagaaccactgccgggaaacaggatcagcggccagagattccccactttggcagaaccatgacacgtttcattatctcttttggttcccccagttgcttttccccttttttttttttttttttaataaaacacttcgtctttttagtgtcttttcatttttcttaactttaaaaaaaattttttttagagacagggtctagccctgtcgcccaagctgaggtgcagtggtccagtcatagttcactgcagcctcaacctcctaggctcaagtgagcctcctgcctcagcctccaaattagctgggactacagccacgtgccaccacgccagcaaggtttcatttcctttggtatctaccaggggttggcaaactacagcccatgagttaaatctgccagtgcctatctctacaaataaagttttattggtgcataaccatgcccatgcatttacatatcatccctggcatctttggcaccatgagtgcagagccgagtaattgcacccgagacactgcatggcccacaaagctgaaaatatttactacctggccctttataggaattttttttcctttgtctaccccagtacatccaccgcttcgtagaatgttccagaaccccataaaggtgaccatttcacagatgcctttttttttttttttttgaaatggagtcttgcttggtcgcccaggctggagttcagtggtgcgatctcagttcactgcaacctccgcctcccgggttcaagcaattctcctgcttcagcctcccgagtagttggtattacaggcgcccaccacaacacctggctaatttttgtatttttagtagaaatggggattcaccatgttggcctggctggtctcaaactcctgacctcaagtgatccacccacctcgtcccccacaaagtgctgggattacaggtgtgagccactgcacccggcccccaggtgtcttcttatcttctgctcagctcccccttcccaaatgtaatgaaagcagctttccatcctagatccagacagcccagatcaccagctggaatctctgcatttgtatccgtgccatagacatacatacgtattcataaacatccatttccccacacagagtcataaagcagtttggggagtcaggaaaggaggacacagatagagatgtcccacagggttcggcggagctaactcactctgtctctctgccccacagctgggagtggtagtacagcccatgcatttgggacctggctaggctggcaggagctgtgcggggttccctccttgccttgaaccccctcacagggctgaacatcagcaggccccatctcttgaagggtttccagctgcctcctgggctctgagatcgcgtgcatcctgcctgcagggcgcacagtctgccagggactcagtgggaagaggatcatggaacctgtgggcccagagtcaccgagcaggaccctgtcatcctcctggtctctcacaccagcccccttcctcactgtagctgacagggcctgaccagaggtgcatgcccaaggccgcaaaccccctaggaggaagctggcatctggggtgtcagaagtgtgactaggagctcagagggtgtactggagcttgcagttgggggataattaagccagagggccacctcttttaagggagagtgaattatggcatgaggacaggcatcccggagtcaggcggctgggaacaaggcagtggtcattgtgacccggcagcattcccagccctggtgccttttccccagctctggagacaaaccagcaggcctgggtgttccccccacagagcacagagagcagcaggcgctgtgaggggcagcctgggtgggaaagagggaatggagggaggggtgcagaccgcagagaggccgctccaagctgaaaaatggggcacatcagccaaagttgtctttggtgggtatggagaggatgggggtgccctacagctgagtgctgaggctggaggctgcattgacccccaggtagaaggggcaccccaccgccacccccaaatccccaggtactccctcggcttcatttctgtgccctgccacataaaacaacacagccctgacgtttggaatgatctaaggctattttagacaaaaggggaagttatattttggggaatgctgcatctaagagaagagtgaaattatggggtatattttaagcaccataaaaaggtctccttggaatttggagaaagttgattaaaagctgaagtgtaaggtctgggacacccctgccacagccctgccctccccaaatgttctgggggttttactgctccagggttatggagacaggggacccatctgtctatcggcgatgtcagcctcaatgtttggggcgggagtgtgggcaggcatcaatcagccacagggcctggctgccaatttgtttcctagtgattatccaggatagatccgatttctgcaggcctcgccctgggcagctcagtccccaatgtcacagtgcagttgccacctaaggtttccttctgtgtgacttggccacagcaagccagaaccagctcctgaaaccagtcccctcgagaaccccattcccgggagtgcccagaggcagcttggcatcttctgcccagctgctgactggccctgtgaccccgacacgtggttcctcctggtaaaagaaagaaagggatgacttagcagtggtcaggcaccagcacccaacaccttccctagagggggttctctgtaaatcccggacagtatcatcacctctttaagggagagtgaattacggccacctctgtctttgtcagtgtcattacagtattctcagcccgatgcggtggctcacgcctgtaagcccagcacttttagaggccgaggcaggctgatcacttgaggtcaggagttggagaccagcctggccaacatggtgaaaccccatctctactaaaaatacaaaaattagccaagcgtggtggcaggcgcctgtaatcccagctactgaggaagctgaggcaggagaatggcttgaacccgggagtcagaagttgcagtgagccaagatcatgccactgcactccagcctgggtgacagagcgacactcttcctcaaaaaaaaaaaaaaaaaaaagaaaagacatatacaggattctagttagcgggtatgtgaactgaggttcttgcctggagctgattctgccatcggttgatgtttggcaactgctggagacatttttggttatcatagctggggagggagagatgctactggcttctggtgggtagaggccaagatgctgctaaacaccccacagtgtacaggacggcccccctctttaaagaatgacccggctgcaaatgtcagtagtgctgaggcagagagacctgctttagtttagaggcctttagagagtacaattgaaaatctggtctggcgctctggacagaatctgcagggagcagtggtaattcagaagccaccacctagatggaggccgggagccatggctcacgcctgtaatcccggcactttggcaggctgaggcaggaggatagcttgagcataggagttcgagaccagcatgacaacatagcgagagcctgtctctatattttttaaaattttttaaaatgaatttatttatttatttatttatttatttttatttttttgagacagagtttcactctgtcacccaggctggagtgtagtggtgcgatcttggctcactaaaacctccgcctcccaggttcaagtgattctcctgcctcagcctcccaaatagctgggactacaggcgtgcgccatcacgcccacctgatttttgtattttttggtagagacatggtttcgccatgttggccaggctggtcttaaactcctgacctcaggtgatccgcccaccttggcctcctgtgatcacgcctgggatcacaggcgtgagccaccatgccgggcctgtttttttaatttaaattttcttttaaatgaagccaccacctgtgtggagggagctgtttgtggaaggtgtaattgttaataagattgtcctccaaggaggatgagaagacgacaagggcaggcagcccctggagaggccctcagtgcaggccggcctgaggggacatctccagtcctgccaaagtgcctggacccgttctcggcacctctcacctctcccctacaaaccagaatttaccagctccaggagttcagaggaatggccaggaagcaagatgtgggggtttgagtgcaggcttggctgcctgcatgctgtgtgacctgcagcaagtcacttgacctctctgttctgcctcctgatctctcacgccccagggcctttgcatgtgctgtgccctcaatctggaatactcttgccaccatcatccttttaagtcccacccaaaggcctccatgtcccttcagtgccagcgcacagcaccactgggagattcagagcacagatccaggatgacgggcaagcatggggtgtggctcccactgccttgcaccctgaggctctgagcaggctctcttcagcgaccctgtgtttcttacagccggcttctggtgttggctgaggaagagccaggaatgagcgagtgctgagatggagtcacaggacactgaggcagcagggaggccgaggaggggagcctgggcggtcctcctatgcctgagtgcgctcccatccttactctggaactgccacgtaaagaaaagcagagatgccccgtggttcatacctgtaatcccagcacttcaggaggccgaggcaggaggatcatttgagctcaggagttttttgtttgtttgtttgttttgttttgtttttgttttttgacacagagtctcgttctgtcacccaggctggagtgcagtggcgcaatctcagctcactgcaggctccgcctcccgggttcatgccattcttctgcctcagcctcccaagtatctgggactacaggcaccaccaccatggccggctaattttttaattttagtagagatggggtttcaccatgttagtcaggatggtctcgatctcctaacctcatgatccacctgcctcggcctcccaaagtgcagggattacagctataagccattgcgcccggccaagctcgggagtttgaggtcatcctggacaacgtggcaaaaccccgttgctacgaaaaatacaaaaattagccaggcgtgctggcgcatgcctgtagtcccagctactcaggaggctgaggtgggaggattgcaggcccatgatatgtcaaaggcaggatgtgtaaaccaagatggaggtgatgaggagcagcttgtgcccaactgtcaggagcagcaagggtctttgtatcatatgatccctctgggctcagggcagtgcctgctgtggcttccccagacccaaggaggatgccacacagtataccattcagcgttggagtgagcgcccaagacaggctgggcagccaccgctactgccccttttcagagcagattggattcaaaggagattatttagccataaaaaggaatgaagggccattcaggctcacatctgtaatcccagtgctttgggaagccaaggcgggaagattgcttgaggccaggagtttgaaaccaccctgggcaacatagtgagaccccatctctacaaaaaataaaaatattagccaggcatgtgcctgtaaccccagctactcaggaggctgaggcaggaggatcgtttgagcctaggaggcagaggttatagttggtgagccatgatcatgccattgcattccagcctcggcaacagagcaagactctgtctcaaaaaaaaaaaaaaaaaaaaaaaagatagatagatagatatctaaatgtatatctcctttatgctaattggtaacagtcctcatggtgagtattgaataaactggctggagtgggtttgtggcggcagctcttggagtatatgttctggagagagagagagagatatataacagcagatatagagcagtttagtcctgacatggtggcacatgcctgtagttgcagataactcagaagactgaagcaggaggattgcaaagccctgggatttacaggcatgagccctcatacccggtctggggtttcttgttgttgtttttcaagacagagtctggctctatcgcccaggctggagtgcaatggtgtgatctcaactcactgcaacctccacctcccggactcaagcgatcctcccaccttagcctcccaagtagctgggactacaggcgtgcaccaccacacccagctaatttttgtatttttagtagagatggggttttgccatgttgtccagcctggtctcgaactcctggactcaagccatccacccatcttggcctcccaaaaggctgggattccagacgtcagccacggcgcctggcctgttgtttttaacacacccgcttacttgtacttggattgtcaactttttctcttcctcaccacagcccactgaagggacacagcagtggtcccacactggggttcgggagatgagggcaaactgaaatcttggtgattcagactttctttccccactaccataagtgagggaacccacacttacagcagatatgtattccaaatatatatatatatatatatccaagagctgccgccacaggatgacgggttgctgaccacagctctggagagtgggtccaaggggagcctgggggccccaaaaggcatcccccaccccaagtttacagagagaggcagtggcacctgcagggagggcagagaggtgctgtggtagctacagaccctccttccagccctccctaaggagattacctttctttacatgtgcaaatgttcacttttgccgcattaaaagtactggaagggcgcggtggctcacgccgataattccagcactatgggaggctgaggcggttggattgcttgaggtcaggagtttgagaccagcctgggaaacatggtaaaaccccatctctactaaaaatatgacaattggcccggcacagtgctgcgtgcctgtagttccagctactctggaggctgagccaggagaatcatttgagcccgggagttggaggttgtgttgagccaggatcgtgccactgcactccagcctgggcgacaggaatgcaaccctgtctcaaaaaaaaaaaaaagtactggaagtctttgctgttcaagtccctgtggtttggagattgtgtggggaagcaaacgtcatctcaagatgaaacctttccaaatgagctgaacacttgcagaatgagcctccactcagactcccctctcagcttagcctaaggctggctcctcccatgatgcaaatacggtgcaagctggttgcaaagtgaggttgagaatctttcttgcaaaagatgcattatttcaggaagccatcaaaagttgcctggaggctaggcgcagtggctcaggcctgtaatcccagcactttgggagtaagaggggggcagatcacctgaggtcaggagttcgagaccagcctggttaacatggtgaaacctcgtctctactaaaaatacaaaaattagctgggtgtggtggcatgcacctgtaatcccagctactcaggaggctgaggcaggagaattgcttgaacccgggagattgcacctctgcactccagcctgggcaacagagtgagactctgcctcaaaaaaacaggtgatctggagaatcactcccctcatacctccttaagtctacatggaacagtctcaaaaatcattcctacatcacagccaggtgtggtggcacatgcttgtaatccaagatgctcaggaggctgagacgggacgatcacttgagcccaggagtttgggacatagacacagacagccaatgacaggcaggtatcagttagcaggcaggaaagaggttcaaccatggtggacagagccttaggagctaatgaggccatgatgctggtaactttaaatgacatcattcagggccagttgcagtggctcatgcctgtaatcccaacactttgggaggccaaggcaggaagctcacttgaagccaggagttcaagaccagcctatacaacaaagcaaaaccctgtctctacaataattaaaaaattaaacaggcgtggtggtgcaaggtggtgctactcaagaggttgaggtgggagggccgcaggacccaggaattggaggctgaagtgagctacgatcacaccactgctctccagcctgggggacagagcaagatcctgtctcagtaaataaataataaataagtaaataaaatgaaaggattttcagcttggcttgcaagtatataaagcaagttctgttccttgctttatacacaagacacacctaaatcaaagggcttcaggaagttaaaaacaaaggggaaagcaagcacaggtgtaccaggcagtgagaaacgggagatagcagagctgcaattcggacatagttcaggcctctgcacattacatgtggcaaagattggttatgatgccaaaagcctcactttgcaataaaggtataacacttgtgaatatctatgcaccaaacaacatagccactgcctttatacagtagaaatttgtgtgtgtgtgtgtgtgtgtgtgtgtgtgtgtgtgatggagtttcactcttgtcacccaggctggagtgcggtggcatgatctcagctcactgcaacctccacctccctggttcaggcgattctcctgcctcaacctctgaaatagctgggattacaggcgcacgccatcacacctggctaatttttgtatttttagtagagacgggtcttgaactcaggtgatccgtctgtcacagcctcccaaagtactgggattacaggcatgagccaccacacctggccacaaagtaaaaattctaaaagatacaaggagaaacacacacacagcttggttgagtagatagaaaataggcaaggatgttaagacgcccaaaccacatgcttaaggcagacattgtggccatatcgtgaactcttaagagaataaacctccttacacatacatggaacattctcaaaaaatcatttttcttttttgagacagggtctcactttgtcacccaggctggagttcagtggtgcagtcttggcttactgcagcctcaatctcgtgggctcaagtgatcctcccacctcagcctcccaagcagctaggattacaggcacttaccaccatcaagtctggctaatttttgtattgtttgtagagacggggtctcactatgttgcccagggtggtctccaacttgtggcctcaagcaatccttccaccttggcctcccaaagtgctaggattactggtgtgagccaccacacctggactcaaaaatcatttctatatcagagtcaggtgtggtggtacacacttgtaatcccagctgttgaggaggctgaggtaggaggatcacttgagcccaagagttcaggaccagcctgggcaacatagcaagaccccatctctacaaataaaaatcattcctatgtcaggtaaagagaaagcatttagaacttcccagagtagaacaattacaagtgacactctaacaatgcaataaaacttcgtggaacttttttttaaagtaaacttatattgagcaactcttagatgaagagatacaaacacagctgggcgtgggggctcatgcctgtaatcccagcactttgggaggccaaggcgggcagatcacctgaggtcaggagttcgagctcagcctggccaacatggcaaaaccccgtctctactaaaaatacaaaaattagccgggcacctgtaatcccagctactcaggaggctgaggcaagagaattgctcaaatctgggaggcagaggttgcagtgagccgagatcgcgccactgcactccagcctgggcaacagagtgagactctgtctcaaaaaaaaaaaaaaaaaaaggtacaaacagaccaaaattgcaggttttctaaaaatcagtgacaaacacccgtatgttatcagaatccatgggctatatttaaagtgatggtaggaggacaccacatagctgaacacccattagatccacaaataggaaagaacggaagtaaatgaattcatgtcctatctcaagctgagaaaaaagaacaaagtaacccccaaagagaatgatttgggcatcaaatgggcaagatgaggccagctgcggtggctcacacctgtaatcccagcactttgggagaccaaggtgggcagatcagttgagcttaggagttcgagaccagcctgggcaacataatgaaaccccatctctaccaaaaatacaaaaacttagccgggcgtggtggcacatgcctgtggtcccagctacttggagggctgagggtggagaatcacttgagcctggaaggcagaggttgcagtgagccaagatcatgccactgcacactagcctgggcaacagagtaaaaccccatccccccccccccaaaaaaagggtaagatgagccctaggggaaatatgataaattcttcagatgttttcacagccttgagaaccaaacaggaccttcccccatcaaagcctggtttgttctgtattctttctgtgacctagtacgtggtttcgtgataacctaaacccaaatttagtgacatatgtaagatttcagtaacttgtttcacacttaggtttttgttgttatttaaggcttcccctaccccacccctgtagggtttgctgtgagactttagctcatggtaggagtctgtccttaaagggccacgtcctagccctgggagtccttgctgcgtttcagtgtttgctgtaatgccatctgcgtctgtggctgacagttggtgtctcttgtgaactgggacatacggcgttgggagcactcagctctctgtacatccctgccgtccgtccatctgaccagcaaccagctatcgagagcctgccggggtgccccaaaccccttgagcaaccagaaaagaacagaacccggcagcagctaggctaggggccctggagagcctccacttcctcctctgcgaataggggagccatgaggttggggtgactcttccacttcctgcccccacatccgcaggccaactgagcctgcagctgcctcctgtgcaggcttgggcttgggggtgtggggagtcctgtcttgcaccacatagctgcctcctcacctccatgacacccacccccttcgcagggtcttccttgtgcctggctggcatcatccccgacatggcccccactaacctcctcattccctcggccccgccttcaccacagctctgagctctgttgaaagcatcagctaaacttctcatttcctcgcctccagccctgcctgctggcctccgccccctctgctcccagctcccagggagtctcttctcacccagccctccttgggcacgtgaccctgtggacccattttgtcctgggtgcttcccaggcctgctcctccacgtccccaccatggcctcgggagaccagtcacccagggtgacactcacctcctgccgacccatcctgctggaaccatgtcggggatccccggaaaaccccatttaacagaggatccagaacagcggcccctggccactcttttctcacgaaaaccagacagtctgtatttcacacagatcctaggggccacccagtctctgtcagaatggcttgactctgctattgtaactcaaatgcagccttaagccagacccagaccgatgtggctgtgtgccaggaaaacgtcatttgctgctgctgaaaattgaatttcacatcaatttcagccatcaagagatcttttgacttttttttttctttttttttttttttgagacggagtctcgccctgttgcccaggctggaatgcagtggtgcgatctcagctcactgcagcctcctcctcccgggttcaagcgatttcctgcctcagcctcccaagtagctgggactacaggcgcccaccaccatgcccggctaatttttgtgcttttaatagagacggggtttcaccatattggccaggctggtctcgaactcctgaccttgtgatccacccccacccccacccccaccccccacccccggccttccaaagtgctggaattacaggcatgagccaccacacccacccgatcttttgacattttttctcccctaagcattttttttttttttttcagatggagtctcactctgtcgcccaggctggagtgcagtggcacaatcttggatcactgcaacctttgcctcccaggttcaagcgattctcctgccacagcctcccaagtaactgggactacaggtgcacaccaccacgcccggctaatttcatttgtagtttggtagagatggggtttcaccatgttggccaggctggtctcaaacttgtgacccacccccctcggccttccaaagtgctggaattacaggcatgatccaccatgcccggccaattttttgactttttttctcccctaagcattttttttttccagttggaatcttgccctgtcgcccaggctggagtgcagtggcgcaatcttggctcactgcaaccttcgcctcccaggttcaagcgattctcctgcctcagcctcccgagtagctaggactacaggtgcccaccaccacacccggctaatttcttttgtattttggtagagacggagtttcaccatgttggccaggctggtcatgaactcctgacctcaagtgatccgccctccttggcctcccaaaatgctgggattatatgtgtgagccaccatacccagccccctaagcatttttaaaatgtgaaaactgtccctagaacgtaggctgtacagtaataggtggctggccacactttgcagacccccggtagagatcactggtaccaggagggtgtcctccatgtggccacacccatgcccctacctgtttgtctgtgaccgctttcctgccacattggcagagctgagcggtgacagcagatggagccaaaaatattcaccacctgccccttcgcagaacaagtttactggcccctgattcacacagaaaatcccgcttaatcctccatctgctaaggcagagatttttccaaaaccttaccttacaggagagaaatctgaaatccaagagccgtgaactaatttgcccaaattgcccagcagtagccttgaacctccaaccctccccctggccaccaggatccactgaatcttgcaaagtgtctcagcagaagtagcctgcaacctggctagtcatggtggctcaagcctgtaatcccagctttttgggaggccgaggcaggagaatcacttgagcccaggagttcaaggccaccctgggcaacatagcaagaccctatctatactgaaaaaaaaaaatttttttttttaaatttagcaaggcacagtggtatgcgccggtggtcccagctacttgagagtctgaggcgggaggatcgcttaagcccaggagtttgaggctgcagtgagctaggatcacaccactgtactctagcctgggtgacaaagcaagaccttgtctcactaaaagaaatagcctgcagccccatgaggacctgggggtttatttccctggcatttccgtgaagcacagccccagctcccagtggctgccccatggctgtttgcttggcagacctggcagagcagaaccccccggtccctcaggcgtcctgggacagggcactgcccatagggctcctgtgtccatgagggcctggcacagccttgggatgtggcctccgcctaccggcttgagccaccggcgctcagggtcacagctctcgtctgggtctgactgctgtcagtgtccccaggtgggcgtcacctactccgtggcctcgggacgagtgctgtttcaggtagaaagttctgctaggaacttggagaatacaggaaagaaataacaggaggtccaagctggctgccaggccctggccagtgtcatgtggtggtctccaccttacccagctagaaggagagaggacttttgcaaaccaaaaagcaaggggacaatctccctctttcagcccctttctttaggctctgtggtggctcgatatttgcagatgttctttctccagccgcagcctctcttggccataccggtcactccttcatctcagtgcctgcatggccttgacgggacaggggagatcagaagttctgcgtggctcatggcctgagcaggggggtggaggcttcacccagaggtggtgttgcagagggaggaagaaacagcatcaagggaccgggcatggtggctcacacctgcgatcccagcacttttgggaggctgaggcaggtggattgcctgagctcaggagttcgagaccagcctggccaacgaggtgaaaccctgtctctactacaaatacaataaaattagctgggcttggtggcgggctcctgtagttgcagctactctggaggctgagacaggagaatcactcgagcccgggaggtggaggctgcagtgagccaagatcgtgccactgcactccagcttgggcgacagagcgagacagtttcaacaacaacaacaacaacaacaaaaagaaacagcatcaaggctccgggaagtgagcagcccactctgtccaggcaggtccagggaggctcccagaggccaagacacctgagctgtggctaaacgtaaccaaacgtgtcagggcaggtgggcagggcatgggccaggaggggagccacggacgcgtcagcctcctgctcttggacttgagggagggcggcagacctttcagcacttctgtttcctcgtctgaaatggggatggcaggtctgcttcttaaaggaatgcgagttgaagagggagtctcgaatcccacagtatatgcccctagtgggccactcctcaccacaggtcatgatatgtcatagtctctgttctccctaaaatgttttagggagaatggtttttttggttttttggtttgtttgtttgtttttagatgggttctaactctgttgcccaggctggagtgcagtggtgcaatcatagctcactgtagcctcgacctcctggactcaagcaatccctctccctcagcctcctaagtagctgggactacaagtgtgtaccaccagacctggtgaacttttcagttatttttctttaagagacagagtcttgctatgttgcccagctggtcctgaatccatggcctcaagcgatcctcctgccttggcctcccaaagtgcttggatcatagatgtgagccacctgcctggcctccctaaaatgttaccaggcattccaaccaagaggagagccatcctttagatagaagatatagaatttttgaccaggcacagtggctcacacctgtaatcccagcactttgggaggctgaggcgggtgaatcacttgaggactggagttcgagaccagcctggccaacatagcaagaccccatctctactaccagtacagaaattagccgggcattggccgggcacggtggctcacgcctgtaatcccagcactttgggaggccgaggcaggcggatcacgaggtcaggagatcgtagaccatcctggctaacacagtgaaaccctgtctctactaaaaaaaatacaaaaaattagccgggcgtggtggtgggcgcctgtagtcccagctactcgggaggctgaggcaggagaatggcgtgaacccaggaggcggagcttggagtgagccgagatcgtgccactgcactccagcctgggtgacagagcgagactccgtctcaaaaaaaaaaaaaaattaaccaggcatggtggtgcacacctgtactccccactactcaggaggctgaggcaggaggatcgcttgaacctggggggcggaggttgcagtgagccactgcattctggcctgggtgacagagcaagacttggtctcaaaaaaaaaaaaaaaatctagaatttttgcctacataggacgttcaaccctggatgtctcttttcacagattctctgtttgactgaacattagactcctgaaccttgtcccagtcccatctgtgcacttctttataaaatccagtttcagctgagaccctgctaagtcagtttaacaggaaccctctgcccttgagagctgatcacccttgatgtctgatcgggctctgtatcttcccccataccccaggtactatctgatcaccctggcctgtcttcagcaagaatcctgttaggtcggtttagctagaaactgctgtatgctcagtgtttcctcttagtaattttccatccactgacccccaccctgctccttggttataaagtcccgcttgcccaagccatattcagatttgagcccaatcattctcccccactggaaggccccatcacagtagtgggaataaaggcatcctgcccatgtgttaatgagtaccattgaataatccttttttgagacggagtctcgctctgtcacccaggctggagtgcagtggcatgatctcggcacactgcaaccgctgcctcccgcattcaagcgattcttctgcctcagcttcccaagtagctgggactacaggcgcacgccaccatgcccggctaatttttgtatttttcgtagagacagggtttcaccgtgttggccaggctggtcttgaactcctgacctcaggtgatctgcccgcctcagcctcccaaagtgctgggattacaggcgtgagccactgtgcctggccctattgaataattcttctctaactttctcaattcaagaaacctttttaaattgcccagaagaaaaatctcaaaggcaggggcgtttggaaggcggccagacttcttccagccctcaatgtccctggtgggcacatggcatccccactgggcccacacctaggccagccctgtcagaggaagaggcaagactgcctctacgttagttttacctagaaaccgtgactggggggaagctgaattatgaccaatagctttatggatttctttcttctgtgcttttcacgaggtttttaaaatttttctttaatttttttggggggtggggcggggaacagggtctcactctgtcgtctaggctagagtgtaatggcacaatcatggctcactgcagcctcaacctcctgggctcaagtgatcctcccatttcagccccctgagtagctgggactagaggcatgcatcaccacgcctggctatttttttcttttttgtagacacaggatctcacggctgctcttgaacttcctgggctcaagtgatctcctgccttggcctcccaaattgctgggattacagttgtgagccactgtgcctggcttattttatttctttttttttttttttttttttttttgagacagagtcttgctctgtcacccaggctggagtgcagtggtgcaatcttgactcactgcaacctccacctcctgggttcaagcaattctcttgcctcagcctcccaagtaggagggactacaggcttgtgccaccacgcccggctaatttttgttatttgtagtagagacggggttccaccatgttggccaggctggtcttgaacccctgacctcaagtgatccatccaccttggcttccaaagtggtggaattacaggtgtgaacgacagtgccaggccttattttatttcttatttatttatttatttattattattatttttttttttttttttttttgagacagagtctcgctctgtcgcccaggctgaagtgcagtggcgcaatctcggctcactgcaagctccacctcccaggttcgtgccattctcctgcctcaacctcccgagtagctgggactacaggcgccaccaccacgcccagctaatttttgtatttttagtagagatggggttttaccatgttggccaggctggtcttgaactcctgacctcaagtgatccacccaccttggcttccgaagtggtggaattacaggtgtgagccacagcgccaggccttattttatttcttttttatttatttatttatttatttttgagacggagtctcgctctgtcaccaggctggagtgcagtggcatgatctcggctcactgcaagctccacctcccaggttcgtgccattcccctgcctcaacctcccgagtagctggaactacaggcgccgccaccacgcccggctaattttttgtatttttggtagagacagggtttcaccatgatagccaggatggtctcgatgtcctgaccttgtgatccgcctgtctcagcctcccaaagtgctggcattacaggcgtgagccactgcgcccggcctattttatttctaattgatgaaagttgtatatattcatgatgtgcaacatgacattttgaaatacgtatacattgtggaaagggtcaatggagctaattaacgtacgcgttacctgacatactcaacatgttttgtgatgaaaacacttaaaatcttctctcttaggaattttcaaaatacaaaaatatttacagtcaccatgttatacaatagatcgcttgaatttattcctcctctctaattgaaatttatatcctttgaccagcatctccccaaccctgccgccacccccggtaaccagtattctactttctacttccgtttttttgagacagggtctcgctctgtcacccaggctggagtgcagtggtgcaatcacagttcactgcagcctcaacttcctgggcctaagcgatccttctgcctcagcctcctgagtatctaggacaacaggtgtgtcccaccacacctagctttttattttttgtaaagatggggtgtcactatgttgcccaggctggtctcaaactcctggcctcaagcgatcctcccatctctgcctcccaaagtgctgggggattataggcatcagccacagcaccagccctactttcctacttcttttttttctgaggcggaggtctcgctctgtcacccaggctggagtgcagtggcaccatctcggctcactgcaagctccgcctcccaggttcacaccattctcctgcctcagcctcccgagtagctgagactataggcacccgccaccacgcccggctaatttttttgtatttttagtagagacggggtttcaccgtgttagccaggatgatctcgatctcctgacctcatgatctgcccgcctcggcctcccaaagtgctgggattacaggcgtgagccaccatgcctggcctgctttctacttctgtgagtttttttttggactgggggtacatgtgtagtttgttacagggatatattgggtaatggttagggttgggcttctaaaatacccatcactcaaatagtgaacactgtatccaataggtaacttttcaaccctcactcccttcctcccctttcccactatgagttcaacttttaaaaattctacacgagtgagatcatgcagtatttgcctttctgtgcctggcttattaacatagtatccctcagcttcatccatgttgttgcaaatgacaggatctctttgttttttttttcgttttgtttgttttttttttttttttttttttttttttgagacagactctcgctctgtcacccaggccagagtgcagtggtgcgatctcagctcagtgcaacctctgcctctcggtttcaagcgattttcgtgtctcagcctcccctgtagctgggattataggagcccaccaacatgcccagctgatttttctgttctagtagagatgagattttaccacgttaaccaggttggtgtcgaactgacctcaagtgatctgcccaccttggcctcccaaagtgctggaattacaggtgtgagccaccatgctcagccaggatctccttttttatggccaaatactattccatagtgtatataaaccacagtttctttatccattcatctgtggggttttttgttttttttcgagacggagtcttgctttgttgctcaggtcggagtgcagtagcacgatctcggctcactgcaacctccacctcctgggttcagacgattctcctgcctcagcctcccaggtagttgggattacaggcatgcaccaccacacccggctaatttttgtatttttagtagagacggggtttcgccatgttggccaggctggtctcgaactcctgacctcaagtgatctgcccaccccggcctcccaaagtgctaggattacaggagtgagccactgaacccagcctattcattcatctgttgatgcacacgtcttggctattgtgattagtgctgaaatgaacgtgagaatgcaagcatttcttccacgtactgatgtcatttcctttggatatatacccagaagtgggattgctagacctagtgagataataatttttttccaaagtttacaacttatattagaaacatgttttttatattataaaagaaaaaaaaatgtgtttctgttaaaggagaggcgttttttggttttgagtgagtccagcgctgtgggttttatagcctggggggaccatggcatccgccttcccggtgcgtgtgccagattatatcgcatagttgttgacaccggggtcccacttcctcccttctgtccaccctggaccccacatgatactccaggcacaccagccacccttgtgctttgagaccgtgcgagcccccggccagcccagccaagcagcaacacaatagcacccctcgctgcgagcgctgggccgcacttccccctcggatgtataatagcaccaaccggatatttttagatgggctttgaaaagtcgcagtgtgctgagaccgcataccagacgcgtgaggtcaccgggcctgggagcagcctctatgcatggataattggtgcacggggtaatcgggtaatcgcagaaccagaaagccagcccttgggcagccatggtggtgggaggggcccctcatatcccaaggcgttccctgtgttacgttcccaagacaccaggcctggctgtgatattagaagtcactgcagagacttgtcccctgggtttaaagtgagcactgtggctctttaaggtacaaatgtacatttctggggcacctctgccacagaccaggctttacaccaaggtactacggggaccctgactcagagagagacccgtttcctgctgcagacaccccagggccaccaacaggactgtcccccccaccccacccctgaggacaggcatccctttgccatctgctcatagttaagcagggaagctttctgagccccttcctgggacgttattttagggtttccctgacagatctctttgaattgagggtgactggggaggagagtctggtcgtgggaccacataggtgaggctgggcttcgtgctgtcaggcagggagcaaggaggagggcctaggcccaggcaccgggccccaggctgaagctgatttcctgcgtgagctccagactatggccctgcagggtcccgtgagcatccaaggagacgagtcagtgcctcgagactgggggtttcactccaaataacaacaaaaaacagttctccagctaccctctggagagctggaaatgaaacctagaaagaccgcagggacccctcagcacctagaatgcagcacatatgggaacctatggaagggacaaagggaccagtgagccccgactacccagccctgcaaccccttttatttctgtctgtgtacatcaatgctccgcagccggggtgatttgccgatctctggggacattctttggttatcccagatggcatcgggtaggtggaggccagggacgctgttcaacaccgtgtagtgcacaggacgcccccatcacacaggatggttcaccctcaaaaagtcccataggcacccaggaaagtcaacttcaccagcagagcccttggtggttcccgcccaccgaccagccccctgggtttcatcagaccctccagagactgtttcaaagttcaacaggtcagaccgggcccagtggctcacacctgtaatctcagcactttgggaggctgagatggaaggattgcttgagtccaggagccccagaccaacctgggtaacacagtaagattcgtgtcgacaaaaataatttttaaaattaggccaggcacagaggctcacgcctgtaatcccagcactttgggaagccgaggcgggcagatcacctgaggtcagaagttcaagaccagcctgaccaacatggagaaaccccgtctctacttaaaatacaaaattagccggggtgatggcgcgtgcctataatcccagctactcgggaggctgaggcaggagaattgcttgaacccaggaggcagaagttgcagtgagccaagattgtgccattgcactccagcctgggcaacaagagcaaactgtctcaaaaaaaaaaaaaaaaaagccaggtgcggtgatacatacctgtggtctcagctccttaagagacagaaatgggaggatcgcctgagcctgggggttgaggttgaggctgcagtgagctatggtcgcaccacttaaactccagtctgggcgacagagtgagaccctgtctccctgtctcaaacaacaacaacaacaacaagaggtgagcaaggctcatgtggtgacccagtccgcccccaccaaaagcacccggctacttcccagacccccttctctgtagaggaccaggtcatctctctctggggccccctccttatcaccttcctgcttggctccgtgccccatgatcttgagctcctccctgtttccttgtcccatgacccaaacagccagctccttgagtagtgtgacccgcacatgggtccagccacagcaactgtccgggcttcaagctctgcccgaggctttgcagctgaatggagccttctccaagggagtatctgggcctcccatggtcagatcctttttttttatttgaaacagagtctcgctctgtcgccgaggctggagtgcaggggcgcaaatgcagctgcagcctcaacctcctgggctgaagcaatcctcccacctcagcctccaaagtaactggaactacaggcacccaccaccatacctggctttttttttttttaatactttaagttctgggatacatgtgcagaacgtgcagtttcgttacataggtatacacatgccatggtggtttgctgcacccatcaacccgtcacctacattaggtatttctcctaatgttatccctctcctagccccctaccccctacaggccctggtgtgtgatgttcccctccctgtgtccatgtgttctcattgttcaactcccatttatgagtgagaacatgtggtgtttggttttctgatcttgtgatagtttggtgagaatgatggtttccagcttcatccatgtccctgcaaaggacatgaactcatccttttttatggctgcatagtattccatagtgtatatgtgccacattttcttaatccagtctatcactgatggacatttgggttggttctgagtctttgctattgtgaatagtgccgcagtaaacatacgtgtgcatgtatctctatcgcagaatgatttataatcctttgggtatatgcccagtaaagggattgctgcatacctggctaattttttaaattttttctagatttggggtttcgccatgttgcccaggctggtcttgaactcctggcctcaagccatcctcctgccttggcctcccaaaatgctgagattacaggcgtgaccactgcgcccagccactcagttgcatttttaatgggacttccccattcaggctgccccacaaaagcctccactcagtggtcagccagtgtcttaatctgttcgggctactgtcacagaatatggttacgcattgcttaactatgggagaaatgcgtcattgggtgatattgtggtcacatgaacatcctagaatgaacttacacaaacctagatgatataacctactacacacttcggctgtaggtgtttagtaggttatatactactaataggtgtgttaatatgtaaccactaataggctatacctatacaaatagatgtagctggccaggtgcggtggctcacgcctgtaatctcagcactttgggaggccaaggcaggtggatcatctgaggtcaggagttcaagaccagcctggccccgaactctggtgaaaccctgtctctatttgaaaatgcaaaaattagtcgggcatggtggctcgcgcctgtagtcccagttactctggaggctgaggcaggaggatagcctgaacctgggaggtggaggttgcagtgagctgagattatgccactgcactccagcctgggcaacagagtgagactcgatctcaaaaaaagcaaaaacaaataggtataacccattacttctaggctacaaacctgtacagcatgttactgtactgaatactgtgggcagttgtaacacaatggtaaatatttgtgtatctaaacataggccaggcctggtggctcattcctgtaatcctagcactttgcaaggcctaggcaggaaaatcgcttgaactcaggaggtcgaggccgcagtgagccaagatcacaccaccgcactccagcctgggcgacagaccaaaattctgtctctaaatagatagataggctggttactttggctcacacctgtaatctcaacactttgagaggccaaagtatgcagattgcttgagcccaggagtttgagactggcctgggcaacacagtgaaacctcttctctacaagaaaataagccaggtgtgctgacacgtgcctgtagtctcagctacctgggagcttgaggcgggaggatcaccttgagctctggaggttgaggctgcagtgagccatgatcatgccactgcactctagcctgggcgacagagtgagaccctgtctcaaaaaaacattggatgaatggggctgggcacattggctcaggactgtgatctcagcactttgggaggccaaggcaggcggatcacctgaggttgggagttcgagaccagcctgaccaacatggagaaaccccgtctctactaaaaatacaaaattagccgggtgtggtggtgcatgcctgtaatcccagctattcgggatgctgaggcaggggaatcacttgagcccgggaggaggaggttgtggtgagctgagatcgcgccattgcaccccagcctgggcaacaagagtgaaactctgtctcaaaaaaaaaagaaaaaatgattggatggatggatggatgggtggatggatggatgcatggatggaaacatagaagcagtacagtaagagtacagtattataatcttatgggaccaccgtcatatatgtggtccatcgttgatggtcattgctgtgcagtgcatgactgtaccatgtagaccaggtggctgaaacaacaaatatattctcacagttctgaaagtgagaagttcaaggtcaaggctctggcagatttggtgtcaggtgaaggccctcttcttggttcattgatggtgttttttcccatgtcctcacacggtggaaggagtgagggtgctctctggggttctcttctataagggcactaatcccattcatgagggccccatgtaagtgacctcatcacctcccaaagacctcacctcctcaacctatcaccttagggttagatttcttttttttttttgagatggagttcactcttattgcccaggctggagtgcaatggcacgatctcggctcaccgcaacctccgcctcccgggttcaagcgcttctcctgcctcagcctcctgagtagctgggattacaggcatgtaccaccatgcccggctaattttgtatttttagtagagacagggtttctccatattggtcaggctggtctcaaactcctgacctcaggtgatccgcctgcctcggcctcccaaagtgctgggattacaggcgtgagccaccgtgcccggccagggttagatttcaacatataaagtttgtcgggggccaggcatggtgactcaagcctgtaatcccagcactttgggaggccgaggcaaggagatcacttggggtcaggagttcgagaccagcctggccaacatggtaaaaccccatctctactaaaaataccaaaaattagccgagcgcagtggcacacacctgtaatcccagctactcaggaggctgaagcacgagaatcacttgaacccaggaggtggaggttgcagtgagccgagatcacaccattgcactccagcctgggcaacagagcaagaccctgtctcagaaaaaaaaaaaaaaattgtgtgagggacacagacatgaagtccataacaaccagtatccatccccctgtggaatgaggccttcaggaagatcctgtctctctgtgtcattgtgtctccggtttccgcctccctggtgtgcttggccaccacctaccccaccccctacaatgggaccttggcaatggccttgccacttccttcacactgtggcctcgctctctcctatcccctgggtggcccagcctctcaaatgggagcatcactgctgccaaactttccacgtgtgactgcagggcgtgccccctgcccctgtgccctccccttgccatgttacctcttccccaaacctagcggtcacaaggactgggacagtggaacaccaggccccaggaccagctctgctgcctctctctcatctacaaggccttacagcccgcatcctgctggcctcaccccatcttctttttcctaaacgaaagagcccccaccttccgccagccaccacctcttctcagcttctctgtcctgccccaggcaccttccctgcctcaagttcccccaggggctccgtcttaaccactctggagcagtaagtccctcatgggaagggggcaccccaggaatctggacagagtgtaggtgtcccccatcttcatccaggtgatggttacatggaaggccccagaggggacccctgcacactccctgcactgcacacacttccctgtatgtgtggactcctcagtacagagcaaaaagattgtcctgtgaaaaaggaatgaaacattgattacaggtgagccaccgtgcctgtcatcacagccctttcggaggccgagttggaaggatcgcttgaggccgggagttcaagaccagcctgggcaacttagagagatgcggtctctacaaaaaattttaaaaattagccaagcatggtggcatgcacctgtggtcccagctatttgggaggctgaggcaggaggattgcttgaggccacgaggtcgaggcttgcagtgagctatgattacaccactgggcgacagcaagaccctgccttttaaaaaaaaaaaaagaaagaaaaaagaagcggcaaccagacacaacaggccataagtgtatgacctcattgacctgagatacccagaacaggcaaatccatagagacaggaagcagattggtggttgtcagggactaggggagggaaatggggagggactgctgatggggacagtctccttttcgggggatcagaatgttctggaaccaggtaaaggcgatggctgcacaacattgtgaatgtactgaatgccactgaattgtacactttaagaaggttaattgtatgtcatgttttacgccaatttttttttaattgctctgtgaacccacttatcttcccaccaaactttagggctcctcaagggaccttccacataccctgccttgtgtccagcagtgagcccagaatccagatcagcccaaaactcctgccacaaagagcccgataggcaatatttgcaccttcgcagactagatggtagtctctgttgcaacacaattgaatgagcctggcatgtaccgataaaacttcattgatggacgctgaaatgtgaagaggtttttcacgtcagggaatattcttctttgggtttttgtttgtttgtttgttccttgtttcaccatttacaaatgtgaaaaccattcttggctcgcaggcgattaaaaaaacaagcatcagaccagatttggcccacagggtgtggcttaccctatcagatgaatggttacaactgaaaagaattcaggcaattgccatttttaatgtcagagacttaaaacttgaacaccggccaggcatgatggctcatgcctgtaatcccagtactttgggaggccaaggcgggcagatcacctgaggtcaggagttcgagaccagcctggacaacatgggaaaaccccgtctctactaaaaatgtaaaagttagccaggcgtggtggtgcacacctgtaatcccagctacccgggaaggtgaggcacgagaatcgcttgaacccgggaggtggagattgccgtgagctgagatcgtgccattgtaccccagcctggcaacagaacaagactctgtttcaaaaaaaaaacaaacaaacttgagcaccacacacaacctcagacacagagataaagagtgaaatgttggaatgggccttggctatacacctctgtatttttcaggtcttatctgggcttctaagtgacttatagcctactgtcttggggacaagtgagtgtcctcaaagccgagaaggagggaggcccagggctccaggctgaggcctatagaagctccatcctcgctggagcccattatccttagcaaactaacacaggaacagaacacctaatattgcatgttctcactttcaagtgggagctaaatggtgagaacacatggacacacagaggggaagagcagacagtggggcctcctggagggtgggaggagggagaggagcagaaaaaatactattggggccaggcacagtggctcacgcctgtaaatcccagcactttgagaggccggggcgggcagatcatgaggtcaagagatcgagaccatcctagccaacgtggtgaaaccccgtctctactacaaatacaaaaattagctgggcatggtggcacacgcctgtattcccagctatttgggaggctgaggcaggagaatcgcttgaacctgggaggtggaggttgcagtgagccgagatcgtgccactgcaccccagcctgggcaacagggcaagactctgtctcaaaataaaaaagaaaagaaaaagaaaaataactgttggatactaggcttagtacctgggtgacaaaataatctgtacagcaaatccctgtgatacaagtttacctacttaacaaacctgcgtgtgtaccccaaaaccttaaaagttaaggctaggcatggtggtgcatgcctgtggtcgcagctacttgggaggctgaggcagaaggatcccttgagcctgggagacagaagttgcagtgagctgagatcatgccactacactccagcctgggcaacagagcgagaccccatctcaaaaataatattaaaaggttaaaaaataaagtttatttagacaacagataaaatgatgtttttgcaaattatgtcacaatctggaaaatattaattaaataaaccgagtctgggcatgatggttcatgcctgtaattccagcactttgggagaccgaggcgggtggatcacttaagctcaggagttccagaccagcctgggcaacatggcaaaaccccatctctacaaaaaattagccaggcgtggtggtgcatgcctgtggtcccagctgctcaggaggctgagacaggcggatcgcttcagcctgggaggcagaggttgcattgagccaagatcgcaacactgcactccagcctgggtgacattgtgtgaccctgtctcaaacaaaaaaaaaaagagtgaaagaaaatgggctactctctgcttactgggtagccctactttgcaggaacagttaaagaaaaaataagagaccaggggtggtggctcatgcctataatcccagcactttgggaggccaaggtgggcggattgtctgagctcaggagttcgagaccagactgggcaacacagtgaaaccccgtctgtactaaaaatacaaaaaattggccaggcgtggcagcgtgcgcctgtaatcccagccactcgggaggctgagccaggagaaccgcttgaactcgggagacagtgcttgcagtgagctgagattgcgcccctgcactccagccaaggcaacagagcgagacttcatctcaaaaaaaaaaaaaaaaaaaaaagaaaaagaaaaaatagagactgggcacagtgactcatgcactttgggaggctgaggcgggcagattgcctgaactcaggagttctacgtcagcctggacaacatggtgaaaccccgtctctactaaaatacaaaaattagccagcatggtagcgcacatctgtagtcccagctactcaggaggctgaggcatgagaattgcttgaacccgggaggcagaggttgcagtgagccaagattgtgccacttcactccagcccaggtgacagaacaagactgtctccaagagaaaaaatagataaattgaacaatacaaaatataaaagcacagtgtaaaatgagaggaaaaaaaagaaaaagaaattccaccctcctgatctgaaacctgcttttgatttccttgcaggcttttggaaatgccaagacagcccacaacaacaactccagccggtttgggaaattcatccaagtcagctacctagagagtggcatcgtgagagggtgaggtgtccctggggtccccactggtgggagctggccccacgcactgttgcttcctgacacacacatgggagtgagatgtggagatcatggctgtgtggatgtttatgctttgtatgggagagcgagtgtgatttttaggtctttgaggtgaaggtctggaacagtaggttgaagtaggaaatgtgggcaggggctgggggacgtggctagaggtagtgggctttaccgagaacaggcaaggacagcccagcccatttcctgtcttgataaagtttctaatttggtaggtcttgggggtgtcacaggcagtggggatgcggactctggcctttgccaaacatgtgctcctttagccagaaaatgacaggtacagagctgcaaagtgaggtggtcgtgcatggaaatactgaagggtgggtgggtggatggactcatgaggggatggatggatggatggatgatggatggatggatggatggatggatggttagagagacagatggattcatgggtgaatggatttgcacgtagatggatagacagatttatggatggatggatggatgaattcatgcatggatggctgaatggatggatagatgaattattgggtgaatggattcatgagtggatggatgaatagattcatgaatgggtgggtggatagatggatggatggatggatggatggatggatggatggatggatggatggatcgatggattgattcatgggggagtagattcatgggtggatggatgcattcatgagtggatctacccatacactcatgaatccatccatcacaggtggatgggtagattcatgggtaggtgaatgaataaatgggtagattcatataatgaatgggtggatggatagattcatggatggatggatggatggatgggtgggtggatggatttatgggtgagtggattcacaggtggctggatagatggattcttgggtggatggatttacaagtgaatggatagaatcataggtaggtggacgaataaatgagtagatttgtgggtgtgtggatgggtggatggatggatagatagatggattcatgggtggatggattcatggatggagagatacatggattattcatagatggatgagtagattcatgggtaggtggatgaataaatgggtagattttgtggatgtgtcaattagcgaatggatagattcatgggtaaattggatggaattggatgggcttgatcagtggatccatggatccattgatgggtggatgagtacttagatggcatctgagagggtccaaggcctggatactcacagggatcccccactaactatagattctcatgtgaggggctgctgtgtcaatgggatttgtaaaggtcccaggattttgtctgtctgaacctgactgatgatcatttcaactgatggttcatattcaagatacaaacaggcatattgttctcctgaaccttccgcctctagcttcatttctttttcccagtgcccaggctccagtaggcagtggtgtgggtgagtggcccttgacaaatgtcaggggctgctctggcccctcggcctcagcccccacaaggcagtcagtggccccccaactcctaccacctgcccacatgggtgtacccggttcatcagaaacacctggaacagccacttgtcccacctgtcttccaggccctgacctctccatgaagaccccacctttttcacttcatattttgggggttaaaatacacaacataaggccaggcgtggtggctcacacctataatcccagcactttgggaggccgaggtgggtggatcacctgaagtcgggagttcaagaccagcctgtccaacgtggtgaaaccgccatctctactaaaaatacaaaaattagctgggcatgatggcaggcgcctgtaatcccagctactcaggaggctgaagcaggagaatcgcttgaacccaggaggcggagattgcagtgagccaagatcaggccactgcactccagcctgggtgacgagcgaaagtccatctcaaaaaaaaaaaaaaaaaaacccaacaaccaaccaaccaaacaagcaaacaaaattagctgggcgtggtggtgcatgcctgtgatccagaaattacaagtgtgagccactgcgcccagacactatgtttaattttttttttttttttttttttttttttttgagacagagtttcgctcttattgcccaggctggagtacaatggcgtgatctcggctcaccgcaacctctgtctcctgggttcaagcgattctcctgcctcagctcgagtagctgggattacaggcatgcgccaccacacctggctaattttgtatttttagtagagatggggtttctcaatgttggtcaggctggtctcgaactcccgacctcaggtgatctgcccgccttggtctcccgaagtgttgggattacaggcgtgagccactgcgcctggccatttaattttttaagaagccaccatactgtctcccatggaagccacaccattttaccttcccaccagcagtgcacaaaggtccccacctcttatctttggttttctttttcttcccgtgggtccatcttttgcacgatcctatctgccacattgcagagattttgacccacaggaagcattcagggtaccttgttgggaagatgacacagatactgttgctacagttccatgcctcccttggggagaagctaagctgcctccttgtcttgtctgggtgtccagctggctctggacagacactgcaggcttgacctccgcatgggcaccgccccctttccaacattatctctgtatgcatttcctaggagggactgccataacagtgtacgacaaaccgtatggctgaagcaacaggaattattctcttatcatcccagaggccagaagtcggatatcaaggtgtccacagggctggttccttctggagtctctagggaaagatcctggctacctcctccagcttctggtggctcccttggctcatggccacattactcccatctctgcctctgtcttcaggtggcatgtgtctctcctctttttatttttttattttttggagacggaatctcaccctgtcgcccaggctggagtgcagtggtactatctctgctcactgcaacctccgcctcccgggctcaagcaattcttgtgcctcagtctcccaagtagctgggattataggaatatgccaccacacccagctaatttttgtatttttagtaaagacagggcctcactgtgttggccaggttggtctcaaactcctggcctcaagtgatccgcctgcctcggcctccccaagtgctgggattacaggtgtgagccaccacgcccgaccccctcttctaaggacatttgtcatcggatttagggccctcctggattattgaggatgatcctgaggcctttaacttaatggcctctgcaaagatccttttttatgttttgagacagggtcttactttgttgcccaggctagagtacaatggcatgattatggctcactgcagccttgaactcctggagtcaagcgatcctcctgcctcagcctcctgagtagctgggactacaggtgcacacccccacacctggctaattttttatttttattctgtagagacggggtcccactgtgttgtccaggctggtcttgaactcctggcctcaagcgatccttccaccttggccccccaaagctctggggattacaggcatgagccactgcgcccagctccctttttccagataaagtcatatccccaggttccaggagacataacttccagggcccaccattggaccagacaccagaagggctggcctggcccagcccatagctaaatggtttagcctccccgaccttccccaggctcccatcatattcaggaccagtggacctccatggccaggtctcccagaccagctttggaaagtcgtatctgtggccttggattcaggaaagggagtcctgcctccacccacaacctcaggactgtggccatcctcgccccagggagggaggtgcacttcctatcccaagaatggccgcagcgatcacacaaagagccggctcagaccggttctgcttttgcccactttcaggcaggtgacacttctccatgccattcccaccaaggccaagggtcaggcacagtccaagcctccccacccagttctccaatttatgaggctgcagcttcctgtgtgttcaaggactcagtgctggaggagccctgggtccctataagaccccttttttaggcccaggccttgaaaatgattggggaagggaaggggccatcatctgtcaagcgacattttgatgccagacctgcagatgcagcacggggaatcggccacaggctgagattgaaacatgagtttcctcctagaaacggacacagcctccctccccaggaatgcaggaaggtgctgaaactggttactagcccggcaaaggaatagaaggaaacatttttttctcctatttgaaagaagagaggacccaggctgggccatcagaagccacctgtgcatcgtgtgtgtccctgtgtgagcctgcagacaaaagactgctgtcttgggctgggcgcggtggctcacgcctgtaatcccagcactttgggggagtgatgcggtggatcacctgaggccaggagttcaagaccagcctggccaacatggtgaaaccccatctactaaaaataacaaaattagccaggtgtggtggctcatgcctataatcccagctactcgggaagctgaggcaggagaatcacttgaacatgggaggcagaagttgcagtgatcccagatcatgccactgcaccccagcctgggtggcagagtgagactccgtctcaaaaaaaaaaaaaaagactgctatgctggagagacaggcgttcagcagaccctgaattgggaacctcgtgctgtcccctggccctgccactccttgggcaccagctgtgtctcctgcataacaggatgggctcagatgagggtgatctggaggccccagtgagctcacatgtctggtgatggcggaccctgtgatagaccggccccaccagacttagccagccccagctggtgcgaaaggatcccaccaggccaccctcttcccacaggggccctgggcagcacatagtctcaccaagccttggctccttgtccactcctcaggagccaccgtgcctgccccagtatggaagaggagtccctgagaaatacatcaaatgatgcctagaacatatttttcctcgaaaaaacattcactgccactacttttagcattgagagatatttggggctgcagagacaccccagtccctgtgctggtaccctcagactcaaggtcccacatgatgccaggtgcctcctgagggacctctgagaacttaatttggaggaaacactttaactgcttggcacagagaaaatgattggtaaggccgggcgcagtggctcacgcctctaatcccagcactttgggaggccaaggtgggtggatcacctgaggtcaggagttcgagaccagccttgccaacatggtgaaacctgtctctactaaaaatacaaaaattaactgggcgtggtggtgggcgcctgtaatctcagctactggaaggctgaggcaggagaattgcttgaacccaggaggcagaggttgcagtgagctgagatcacgccattgcactccagcctcggcaacgagagcaaaactccatctcaaaaaaaaaaagaaagaaagaaaatgataaataaacggcagaacaccagaccatatggatacaaccaagtattgctgggtatcacagacccctgtgcttccaaggacactgtgacaaaattggaaaggaatccccagacccagagaaggtacctgcaaatcagaaccagcaaaggacttgcatctagaatatagaaagagcatttacagctcaataaaaggaccaacacccaataagaaaaccacaaaagacgtcaatgtatacttcatcagagaagagctatgaatggccagcaagcacatgagatgttcagcatcattggtcatcagggaaatgcaaatccaaaccacagtgacaggctagatgcatggctcacgcctgtaatcccaacacttcaggaggctgagacacgtagatcacttgaggccaggagttacagaccagcctggacaacatcacgaaatcccatctctacaaaaactacaaaaactagcctgtagtcccagccactcgggaggttgaggtgggaagatcacttgagcccaggagaacaaggctgcattgagccattatcgtgctactgcattccagcctgcacaacagagcaagatcctgcgtcaaaacgaatgctgggtgcagtggctcatgcctataattccagcatattgggaggctgaggcaggtagatcacctgaggtcaggagttcgagaccagcctgaccaacatggagaaaccccgtctctactaaaaatacaaaattagccaggcatggtggcacatgcctgtaatcccagctactcaggaggctgaggcaggagaatcgcttgaactcaggaggtggaggttgcagtgagtagaaatcacgtcattgcactccagcctgggcaacagagtaagactccatcacaaaaaaaaaaaaaaacccacaaggacataccactgctcacccactagggtggctagaataaaaaagacagtgaataacaaatattggccagggatggtggctcatgcctgtaatcccgcactttgggaggccaaggcgtgcagatcacttgacataggtcaagagtttgagatcagcctagccaacatggcaaaaccccgcctctactaaaaatacaaaaattagctgggtgggggttggcacacccctgtagttccaaccaaccactgtgggggccgaggcaagagaatcgcttgaacccaggaggcagaggttgcagtgagccgagattgtgccgttgtactccagcctgaacaacagagcgagactcccatctcaaaaaaaaaaaaaacaactcaatattaacacaatactaaaatgtaatgttttattctttctgtttttctcttaatgacagagctgtcgtcgagaaatatctgcttgaaaagtctcgcctggtgtctcaggagaaggatgagaggtaggagaatgttttcccaggaatctctgaatgccacgccatgtctacgtttcctcctacagaggagagaagcaaagcaaacgtcctgaggtcggaggaattctgggggaggccgtggaggctctcacaggagcagggcctgcccatccatcttctccccagacctgcccctgtggcctcacactttgtcctcatacctcccaagccacctttgtgtgcctccctggaggttttatccccagtatgtgctcagatgtctgcacaaaatatacttagattggaaacatttctcaagcatggtagcacgtgcctgtagtcccaactattcaggaggcctaggcgggaggatcgcctgagcccgggaggttgaggctgcagtgagctagacaccacacttcagcctgggcaacagagcaagtccttgtctctgtttttggttggttggttggggtttttttggtttgtttgtttgtttgtttttgtttttgtttgtttgagtcagagtcttgctctgtcacccaggctagagtgcagtggtgtgatcccagctcactgcaacctccgcctcctggattcaagcaattctcatgcctgaggcgactctcatgcctcagcctcccgagtagctggaattacaggcatgcaccaccacgcccggctagagtccttgtctcttttaaaaaaaaaaaaaaaagaaaggcctggagcagtggctcacacctgtaatcccagcactttgggaggcctaagaggcaggatcacatgaacccaggagttcgagaccagcctgggcaacatggcaaaatcccatctctacaaaaaagaccaaaaaaaaaaaaattagctgggcatggtgacacacacctgtagtcccagctactcaggaggccgagctgggaggatcacttgaacccaggaggtcgaggctgcagtgagctgtgattgcaccactgcactccagcctgagtaacagagcaagaccgtatctcaaaaaaaaaaaaaaagaaaagaaagaaacatttctgattgacaaataagtgagatgtacacccacccacctccaatcctccagaaatctactcgctcacgacactcatttgttttgttttgtttttttaagacatagtaagaactgacgtactgttttaaatttgtacatatttgaggtgtgctctccaaagccatgttagtagtggttcgcagagtagctattacttggcctccaaaaacaactattttcctcccaattttgacctgtaggaactaccatgtgttttattatttgttacttggggtcagcgaggaagagcgccaagaatttcagctcaagcagcctgaagattatttctacctcaaccaggtaaacagcctcaagcccgagccacaaacgccacctctgttcccggcctcaagctgtttatgtatagccgggaagtcagaggcagcctgccctggcccccgaacccgctcccagaaggcagcattaaaagaacccattcattcccctggtcctggggccctgccccaccagctccagccaaaatcactctggcacgccacccttgccggcccaggaatgcccagagtacccatgcctttgttttccagcataacttgaagattgaagatggggaggacctgaagcatgactttgagaggctcaagcaggccatggagatggtgggcttcctccccgccaccaagaagcagtaagtgtgcgggctcccggggcctgtcccccagagcctacagggggcacgcatggcccttaccagtcactctgaggtctaacctgcaacccagtgaaaacaggcaggcagtgtcctgaacagtgccgccatagggagtgtggcccaatagcagcgatcacatgagaaggggctcaagacattggtcattaggcgatgccaattaaaggtaacgtgaacatacttaacactgctgaattgtacccttaaaaatggtttagccaggctccacgtggctcactcacgcctgtaatcccagcactttgggaggccaaggtggaggattgcatgggcccaagagttcaagaccagcctgggcagcatagtgagacctcatctctacaaaaaataaataaaattagccaggcgtggtagtatgcacctgtggtcccagctacttgtggggctgaggtgggaggatcacttgggcctgggaggacaaggctgcagtgagccaccatgatcatgccactgaactaatcacgccactctgggtgacagagcgagacccagtctcaaaaaaaaaagaatgctgggtacggttgttcacacatgtaatcacagtgctttggaaggccaaggcaacaggaccacttaaagccaggagttcaaggctgtaagtgagctaggattgtaccgcttcatttcagctcgggcaacagagtaagatcctgtctctaaaaatcaaagaagttaaggtagtgaattttatattatgcttatgttactacaatttaattatttttttttttagatggggtctcgctctttcacctaagctggagtgaagtggcgagatcatggctcactgcagcctcgacctcccctggttcaggtgatcctcccacctcagcctcccaagcagctgggactacaggcgcgtgccaccacacctggacaattttttgtagagatggggtttcctcatgttgcccaggctaattttgaattcttgggctcaagccatccacctgcgtaagcctcccagcatgctggaattacaaacacaagccaccgcgcccagcaatttaaatttttttaaaccaggcatggtggctcatgcctgttatcccagctacttgggaggccaaggcaggaagatcgcttgagaccaggagttggagaccagcctgggtaacatagcaagaccccatcaatttttttttaaattatccaggcatggtggcacacacctgtagtcccagctacttgagaggctgaggtgggaggatcacttaagcccaggagttcacagctacaatgagctaagatggcacctctggcccgggcgcagtggctcacgcctgtaatcccagcactttgggaggccaaggcaggtggattgcctgagctcacgagttcaaggccaggctgggcaacatggcgaaaccctgtctctactaaaaatatgaaaaattagccatgcatgatggtgcacgcctgtaatcccagctactcaggaggctgaggcacgagaatcacttaaacacagaaggcagaggctgccgtgagccgagattgcgccactgcactccagcctgggtgacagagcaagactctgtctcaaaaaaaaaaaaaaaagatggcacctctgaatagccagtggactccatcctggacaacatagccagtgactggccagacacaagtaccatcccatcaagttcacagacagcattagacgtcaggacagtggttcctctggtgttggggggctctaggatccaggacttggaatgttctatttcttggtctgggggctagtcagagggatccgtacacttcttttttcttttgtgagacagtttcactagccaggcatggtggtacaaacctgtagtcccagctacctgagaggctgagataggaggctcaactgagcccggggaggttgaggctgcagtgagccgtgatcgcaccactgcactccagcctgggtgacagagtgagaccctgtttccaaaaaaaagaaaatagctgtctagccaggtgcagtggctcgtgccaataatcccagctattcaggaggccaagacaggaggatcacttgaggccaggagtttgagaccagcctgggcaacatagcaagaccccatccctttaaaaatatgtttttaaattagccaaatatggtggcctgtagtaccagctactcaggaggctgaggctgtagaatcacttgagcccaggagttggaggttacagtgagctatgattgtgtcactgcactccaacctaggcgacagagccagatcaaatccaggaaaaagataactgtctgcaaagtcacattccacagaggccatcctcaacagaggccttagacatttttcaaatttcatgcgttccgaccagaatttgctggttttatggattcagcccggttccctgggaagtatctgctgtcttaggaacgtagaaactacccaaatatgagtgccttttctttcccaggatttttgccgtcctctcggccatcctgtacctgggcaacgtcacttataagaagagagctacaggccgagaggaagggttggaggtcgggccacccgaggtgctggacaccctgtcgcagcttctgaaggtactgattgccacctctgtcccttctcaggcctggctcagggccgctggctatctctcagtacgagggaccatacccagaacttcctacgtcagctgaggtttcatcaaccaggacctcacgtcttccgctatcatctctacagtgttccttcctcatttctgatgagctctgtggacaggggcacctcctcctcccaccctcaagtgaaagcctctttaaaactacagctcaggggccgggtgcggtgtctcacctgtaatcccagtactttgggaggccaaggtgggcggatgacctgaggtcaggagttcgagatcagattggctaacatggcaaaacctcatctctactaaaaatacaaaaagaaattagccagtggtggtggtacatgcctatagtccaagcaacttgggaggcagaggcacgagaatcacttgaacctgggaggcagaggctgcagtgagccaagattgcgccactgcactccagtctgggcgacagagcgagactctgtctcaaaacaaaacaaaacaaacaaaaaaaaactacagcttggggctgggtgcggtggctcatacctgtaatctcagctactcgggagaccgaggcaggaggatcacttgaggccaggaggtccagactagcctgtacagcatagcgtctgtcgatctctacaaaaaatacaaaaattagccaggtattggtggtgtactcctgtaatccaagctacccagggggccaaggcaggaagattgcttgagcctaggagttcattgccgccgtgagctgtgatcatgccactgaactccagcctgggtgagtgacagagtaaggccctgtctcttaaaaaacaaaaaattctagtttgatcaagtcattttctcattggacctgccatcccctcctcctccaccggttctcagccaggggcagttctgcccctaggacacactgggcaatgtctggagaactttctggttgccatactctgggttgctcctggcatctgctaggtagaggccatggatgctgcccaacaccccacagcgcacaggacagccccccaatggcaaagaattatccaaccccaagtgcaaatggcagtgaggccgaggagccctaccccagtcttttgttttttaatccatttatgctttgcgttccattattggtacaggagccccagcttctgttgagttcttggggatatgtgagcatctgctgggatatttagagaaagcccctgccagccaggcacggtggctcacgcctgtaatcccagcactttgggaggctgaggcaggtggatcgtctgaggtcaggagtttgagaccagttcgagaacttcaggccccaaagcctgaccaatatggagaaaccccatctctactaaaaatacaaaaattaactgggcatggtggcaggtgcctgtagtcccagctattcgggaggctgagacaggagaatcacttgaacccaggaggcagaggttgcagtgagccaagattgcgccactgcactccagcctgagcaacagagcaagactccatctaaaaaaaaaaaaaaggagaaagctgccgcttattccccactcttgctgctggtgggcagagaccaccagctctgaaagggagcttggcagtgcggggagggatgagcgtgtcggctgtctgggtaaggtctaagcccaggccctgtgcaatggatgggaaccaccagctccaataggcaaggcggccacctggacccgtggctcgcactcacataaggcctgtacatacacatacccgggccacggagcatgagcatccggcaagcccgtgctatgtgggaattctgaaacctgccaagtgtaaaacagtacatcgcaggccaggtgcagcggctcacgcctataatcccagcactttgggaggcccaggcaggcagatcgcccaaggtcaggagttcgagaccagcctggccaacacagagaaaccccatctctattaaaaatacaaaaattagctgggtgtggtgacgggtgcctgtaatcccaattactggggaggctgaggcaggagaattgcttgaacccaggaggcagaggttgcagtgagccaggattgtgccactgcactctagcctgggtgatagagtgagactctgtctcaaacaaacaaacaaacaaaaaccaaaaaaccagcacatcgcgggtgggtgggtgggcttcaggtcccacttctaggcctggctgctgggggtccgtctcccagctgcctcaggctccgggcgttgcctcagtgataccaggacatgcctgataagtcctccatctcccttttccttctccctctccttgacctccaaacaggtgaagcgagaaatcttggtggaggttctgaccaaaagaaaaacggtgaccgtcaacgacaagcttatccttccctacagcctcagcgaggtgagctctgcccaggcactcacagggtgccagatcccaaaaaccaagtgggaatggtctttggaaagagccggcatgggtgggctgttctgtccctgaatgctagaatggaacctaggcagtgcctctgattgtcatgcaagctcaggtgtggcacaagccagcctgggaggcaaaccatgggcctcaggccagaacttgagccacatgcattcaactctgtgtttccagatgttccgtgtgcatgctggttctcactagcaatggttggccagatccagccctccacctggttttgctaataaagttttattggcacatggccatacccattcatttacataccacttaagactgctttggagccatagcagctaagcagagcagttgcaacagagaacatcaggccccaaagccaaaaataatgactccttcatcccttccagaaaagaatttgcccatccctagactctggaacatgacactgactacccttatgtaactcccagcctgtgagtctcaagcctgtgactctaaaccttgatcaggtgcctccctctggtctttgccccagcctggatgttttctctgtgctgtatttctcttgcatttttacatctcaagagcaggatcacttgcagcttgtttaacaataggaaagtacctaatcacggcagggatttttagcccctcacccgatgggaagctgctgtggcatttcaaacaggcaccggggacattctgagcccacatgggtccagggcaccacgtgatattgctgcatatcacccaagacccgagcagcactggtgtccccagaggctccatgcagagccaaaggcaccaggcaggggctgcattctgtgtggctccatttccttgacacccaagaaatgcaaaacgagggggacacattctagatcttgtctgtagctgaatacatctgtcagagctgagacctgaatatgtggggaaaaaagccaatttattccatatagattagaccttaagagcttcttttttttctttttttttttttttttgagatagcgtctcactgttgcgcaggctggagtgtagtggcacaatctcagctcactgcaacctctgcctcctgggttcaagtgattttcatgcctcagcctcctgagtagctgggattacaggtgtgcgccactaggcctggctaattttttttgcatttttatttatttatttatttatttttatttttgagacagtttcgctcctgttgcccaggctggagtgcaatggcaggatctcggctcactgcaacttccgcctccagggttcaagcaattctcctgcctcagcctcctgagcagctgggattacaggcatgtgccaccacgcccggctacttttgtatttttagtagagacagggtttcaccatgctggtcaggctggtcttgaactcctgacctcaggtgatccacccgcctcggcctcccaaaatgctgggattacaggcgtgagccacggtgcccagattttttttttttttccttttgcatctttagtagagacgggcaatccacccgcctcggctcccagagtactgggatgacaggcgtgagccaccacgtccggccacaaaagagctttgatgcacacggtgacagccacatggtgcacccggaagaacaaggggcctgaagttagttagaccctccttgctggttctaccacagtcgcacgccccaccccctccccgagcccaggttcctcactcagcagcaattttggttgctctgaggagcgtatggaaaggcttcagcggccgttccagaggctactgggtctgttaacgcctcagtgtgcaggcacatcctccaggacagggtgaaatatgggtgttggatgagtcgagtgttgacagagaccaccttggctggttgcagtggctcacgcatgtaatcccaacacttacggaggccagggcagaaggattgcttgagcccaggagttagagtccagccttggcaacatagtgagaccccgtctccacaataaaattaaaaattaaggccaggcacggtggctcacgcctgtaatcccagcactttgggaggccaaggcaggcagatcgcttgaggccatgagttcgagaccagcctggccaacatggcaaaaccccgtttctactaaaaatacaaaaattagccaggcatggtggtgcgtgcctgtaatcccagctactcagaaggctgaggctggagaatcgcttgaacccaggagggagaggttgcagtgagccaagactgtgtcactgtacttcagcctgggcgatagaacaagactccacctcaaaaatatatgtatatattaaaaattaaccaggtgtggtgttgtgcgccatagccccagctacacaggaggctgaggcaggaagattgcttgagcccaggaagtggagtttgcagtgagccaagattgcgctagtgcacttcagcctggataacagagtgagaccctgtgtcaaaaaaaaaaaaaaaaaaagtacaaagggccatcttggccagacacagtggcttatgcctgtaatcccaggactttgggaggtcaaggcaggcagatcacctgaggtcagagtttgagaccagcctggccaacatggtgaaactccatctctagtaaaaatacaaaaattagccaggtatagtggcgcttgcctgtaatctcagctacttgggaggctgagacaggagaatctcttgaacccaggaggtggaggttgcagtgagccgagatcatgccactgcactccagcctggatgacagagcaagactccagcgcagggcctgccgtgccggaggtgagtcaccccctctgtgtccacaggccatcactgcccgcgactccatggccaagtctctgtacagcgccctgttcgactggattgtgctgcggatcaaccacgcactcctcaacaagaaggacgtggaagaggcagtctcggtgagtgcccccatttgcttcctcaagcccggccaggggaggccacatcctcactaccaatatccttggtgggcgacctggaacatccggagccgaggcatctgcaatcaagaggctgtttccccacaaggacaggcccaggaaacaggacaggctacgaaattcaacaggcccagggcagaatgaaaacataaggccccttattcaaaaacgacagattctggcatgtacctgtggtcccagctactcaggaggctgaggcagaaggattgcttgagcccaggaggtcaaggctgcagtgagctgtggtggcgccactgcactccaacctgggcaacagagcaagaccccatctccaaaaaaaaattatggattccatgctggtaatggcaaagtgttctgccgagcaacagggactggggacctaacaggtcacagcctgtagagccaacccctctcatgaaggctggctccctcggggtgcacctgcgggcagtgaccattttctctgtctctcccagtgcctgtccattggggtcctggacatcttcgggtttgaagacttcgagaggaacagctttgagcagttctgcatcaactacgccaatgagcagctgcagtattacttcaaccagcacatcttcaagctggagcaggtgcggaaagggcttttttgtcaattttttgaacttggtaaatcagacatcacgtgaaatttaccatcttaaccatttgtaaatattcagttcagcggcggtaagtacattcacatattcgcattgttatgcaaacgccaccaccatacatctccagaactctttcattttgccaaactgagactctgtccccatgaaacactcactccccattccccctcttgcaagccctgaactcaccccattccacttttttttttttttttttttttgagacagggtcttgctctgtcacccagctagagtggtataatcatagcttactgcagcctcaaactcctaggctcaagtgatccttcctcggcctcccgagtagctggaaccacaggtgcacactaccatgcctggctaatttttgtattttttgtagagacaaggttttgccatgttgctcaggctagtctcgaactcctgagctcaggcaatctgctcaccttggtctcccaaagtgttgggattacaggtgtaagccaccatgcctggcccattctattttctgtctctatcatttttgactaagtgcctcatataagtgaaattagacattatttgtctttttgtgactggcttatttcgcatagtataaagtcctcatggttcatccacatagtagcatgtgtcagaatttccttccttttcaaggctgagtaatattccattttctggatgtaccacattttgcttatccatccatccttcagtagacacttgggttgcttccagcttttggctattgtgcataatgcttctttgaacatgggtgtgcaaatatctcttcaagacgctgctttcaattctttcgggtatatacccagaagtggacttgctggatcgtatggtaattctgtttttaacttttttgaagaaccaccatactgttttccataacagctgcagcattttataaggaaatatcatgttgttgcacacccagcccaaagggaaaatagcatgagctagaaccggaatctccctagaggcccagatcattggtgaacttgccccagaatttttctcagtcaaaaggaaaacttaagaaaacccacccagcccaggatgaggcaaatgtcaggaatgttttgagccacagttcatgtgggggcttctgtgtccaaacagaaaatctttttgttagttgagaaacagggttgccttttaaggatttgcttagctcaaggacattgataacctatctgacgtgtctttttttttttttgagatggagtctggctctgttgcccaggctggagtgcagtggcacgatctcggctcactgcaacctctgcctccctggttcaagcgattctcttgcctcagcctcccgagtagctgggactacaggtgcatgccaccatgcccagctaattttttgtatttttagtagagatagggtttcaccatgctggccaggctggtctcaaactcctgatctcaggcaatcagcccaccttggccttccaaagtgctgggattataggcgtgagccaccgcgcctggccctgatgtgtctttttgcagctaaatagtcaaccatccttattcatgtcttctccttcacgttgatgattctgatgggaaaatgaaactgacaggcttatgtaaatatccagctgattttcctattaagctttttggcagtgaagcattgggagtgtagctggtcagaattaagttgtgcaggaagggtgtgacatacacactaaattgtgaagacttagcacatgagaaaaaagaacatacacggtctcagtaccttactgcagcctcaaacgctgaggtttaggcgatcctaccaccacagccccctgagtagctgagactgtagttgcacaccaccacacccagctagttttttggttttattttttgtagagacagggtcttgctatgttgcccaggctggtcctgaactcctggcctcaagtgatcctcccacgttggcctctcagtcatttttatgtcagttacacattaacgtgatcacattttagatacacagggttaaattaagtgtattattaaagttaattttgagccacacagaggcacatatctgtagtcccaactactgaggaggctgaggtgggaggatcccttgagcccaagaggtcgaggctgcaatgagctacagttgtgccactgtactccagcctgggtgacagacgagaccctgtctcaaaaaaaaaaaaattaattaatttcacctttttttttactttttacatgtgattattagaaaatttgaggctgggcatggtggctcatgctaacaataccagtggtttgggaagccaaggtaagaggattgctttaggtcaggagttcaaggctgcagtgacctatgatcacaacactgtaccccatcctgggcaacagagtaagaccctgtctctaaaaaaaaaaaatttgagatggagtttctgcgaaaaaaaatttttttattaaccaggcatatagtggcacatgcctgtagtcctagctactggggaggttgaggcaggtggatcactcgagcccaggagtttgaggctacagtgagctgtgatcgcaccgctgcactccaatgtaggcaacagtgtgagaccctgtctcttaaaagaaaaaaagaaaatgtgaagattcctgttggacaacatagctctggaacaggggccagcaaaccacagcctgtgggtcaaatccagtcccacaaattgtttttataaataaagctttattggcacatagcctttggtttgcattatcatctgtggctgttttcacatcacgactgttagttgcaacagacattgtctggttcataaggtgctatctggcccattacagagaaagtttgccaacctctaaatgattttaagtgtgattttttttttttcttgaggcagagtcttgccctgtcattcaggccggagtgcaatggtgcaatctcggttcactgcaacctccacctcccaggttctagtgattctcctgccccagcctccccagtagctggggtcacaggtgtgtgccaccaggcccggctaatttttgtatttttagtagagacagggtttcaccatgttggccaggttggtcttgaactcctaacttcaggtgatctgcccacctcagcctctcaaagtgctgggattacaggcgtgagccaccacgcccagcccttgtgtgatatttaaagtgccatgctgtgatcagtatttaagaatgtgcattcttgtttcctgtttacaatcattcatttatctagtaagtttatgtaactattaatgtattcatattgatttactcatatgcattttgttactgatatatttatgtttttttttttcactttgaagttcaggggtacatgtgcagatttgttacataggtaaacttgtgtcatgggggtttgttgtacagattatttcatcacccaggtattaaacctagtacccactagttatttttcctgatccgctcactcctcccaccctccaccctccaataggccccagtgtgtgttgttcccctctatgtgtccatgtgttctcatcatttggctccctcttataaataagaacatgcaatatttggttttctgttcctgcattagtatgctaagggtaatggcctccagctccatccatgttcctgcaaaggacatgacctcattccttttttatggctgggtagtattccttgatgtatatgcaccacatttgctttatccattagtgggcatttagattacttatttgttattgtgaatagtgctgcaaagaacacacacatgcagatacatttatatgtaaacatgcctattgatacataaatatgttcctacagtgtggggatcccttatccaaactgcttgggagcagaagtgtctcaggtttgggatttttttcagatttttcaatatttatattatacttactggttgaacatcccaaatctgaaaatccaaaatctgaaatgcttcaatgagcgttgtctttgagcatcacataacattggcagtccaaaagttttggatttttttttttttttttgagatggagtcttgctatattgcccgggctggtctcaaactcctggactcaagccatcctccagcctcagtaaagtattttttactttttattttttgcacagacaggatcttgctatgttgtccaggctggtcttgaactcctggcctcaagcgatcctaccaccttggcctctcagttactttttatgtcagttacatgttaacatgatcacattttggatatatcatgttaaattaagtgtattattagagctatttttttttttttttttttgtgacggagtttcgctcttgttgcccaggctggagtaggactaatggcgcaatcttggctcactgcaacctccacttcccgtgttcaagcgattttcctgcctcagcctcctgagtagctgggattacaggcttgtgcaaccacgcctggctaattttgtatctttagtagagatgggattttgctatgttggtcaggctggtctcaaactcctgacctcaggtgatccacctgccttggcctcccaaagtgctgggattacaggcgtgagccactgtgcccagccctattagagttaattttaagccacgcatcagtttaaaaagtttcctattttgaagcatttcagattttcggattagggatactcgacctgtatgcaatatatgttatgtagatattacatatctgggagataagaaacttaccgaccccgcgccacccctgcaggaggaatatcagggcgaggggatcacgtggcacaacatcggctacacagacaatgtcggctgcatccatctcatcagcaagaaacccacgggcctcttctacctgctggacgaggagagcaagtgagtgtccacaccccgtccatcccggcacatctacgcatgggcactgggtcaggttctgcagcccccagagccttaccccaaatccagactttcccaagagcgcctttttatttttgagacagggtctcactctgtcacccaggctggagtgtagtggtgcaatcaaagctcactgcagccttgacctcctgggctcaagtgatcccctgacgtgagcctctggagtagctgggactacagggtcacaccaccatacccggctaatttttgtatttctttgtagcaacagggtttcgtcatgttttccaggctggtcttgaactccttagctcaagggatcctcccgccttggcctccgagagtactgggattacaggcgtgtgccaccacgccagaccttgtgctgagaacttgtgtctgttcatttcacttgaccacaaaacccaagctcgtgtgtgcaaaatgcacaaacacctcattgtgaaaacatcaacacgtgtgattaattcgtgcacttgaggcacatccgccaggagttttcagcaaaggattatgggcctatgcctagaaactagacactggggccagacgtggtggggcatacctgtggccccagctactcaggaggctgagacaggaggatcacttgagcctgggaggttgaggctgcagggagctgtgatcgtgtcactgcactccagcctgggcaatggagcaagagacaggattggcgagttgttacaaagggcagtgcagtgtgtggaattgggacccagatgctgctgggctctggtctcacttctgagccttcctccctcatccccacagtccacagggcgctgtgaaggcagacaggtcaataaggcacctcattctgggtcacccagttgtagtcactgaaatcacgtgacacataccgaactactttcctgtggctcctctaaggaaccgctacaagccaggtgggctcttgagcccaggagatcaagaccagcctgggcaacacagaaagattccacctcggccaggcacagtggctcacgcctgtaatcccagcactttgggaggccgaggcaggcggatcacctgaggtcaggagttggagaccagcctggccaacatggtgaagccccgtctctactgaaaatacaaaaattagccgggcatggtgacaggcgcctgtaatcccagctactcaggaggctgaggcaggaaaattgcttgaacctgggaggcggaggttgcagtgagcggagatcactccattgcactccagcctgggtgacagaccaagactctgtctcaaaaaaaaaaaaaaaaaaaaagattccatctctacaaaaaaatttttaaccagcctggccaacatggcaaaaccccatctctactaaaaatgcaaaaattagccaggcatggtggcgggtgcctataattccagctacttgggaggctgaggcaggagaattgtttgaacccgggaggtggagttcttaaaaccacagtaatctattctcttatggttctggaagctggaagtctaaagtcaaactgtcagcagagctgtgctgcctccagaggctccaagggaggaccctttcttgcctcctccagcttctaggggtccaagctttccttggcttttggccacatcactccagtccctgcctccctcttcctcttcacatggacttcttccctctgtgtctgcatcattcatctcaatcctgtctcctcctttttttttttttttttttttttttttttgagacaggctcttcttgctctgttgcccaggctggagggtagtggcgccatcttggctcaagttaattggcgtcatctcagctcactgtaacccccacctcccaggatcaagcgattctcgtgtctcagcctcccgagtagctgggatcacaggtgccttgccaccatgcccagctaatttttgtatttttagtagagatggggttttttcaccatgttggccaggctgcttaaaaatttttttttgtagagatggaatctccctgtattgcccaggctagtcttgaactcctgggctcaagcagtcctctcaccttgacctcccaaagtgctgggaccataggtgtgagccattacacctgaccctgtcttctgtttttagaaggacaccatccatatggaactaggtcccacgctaatgacctcatcttaactaattacatctccaaagaccctattttccaaataaggtcacattcaaaagttggtggtatggggttaagatatggacatattgtcttatcagcagctctatcagacccatcccttgccaatgacatctccaaggggctggccagagactcaaatgaatgaggcacatcccctgcctcaaacctagtccctgtccaggtcagggagacagacacatccctctgaggctggggtccaggtagagaatgttcagataagagcatttgtgccaggtgcggtggctcccacctgtaattccaacactttgggaggccgaggtggaggatcatttgagaccaggagttaaagaccagcctgggcaccatagtgagaccccatctctacaaaaaaaaaaaaaaaaaaaaaaaaaaactagctgggcacagtggcatgcacctatagtcccagctactcaggaggctgaggcaggaggatcacttgagcccagagagtcaaggctacagtgagttgtgattgtaccattgcattctagcctgggcaacagagcaagaccccagctctaaaaattaaaaaaaaaaaaaaaaaagtagagacggcagtaggaggagctacgtcatcacaaccaggaaactcccagggtcagatcaggggaagcccgtgaggcaaggcctggcccagcaggctcgagtctctttaaaatcttgctatttttgctcatcatggaattttttttttctttttgcacattgatttagattttctgaaatactgtgctaaaatattacctatctcaatgactgagggttttgggggacactcaaggcagatgccttacactccataccctctttacagtcctggaaatgatatgtttcatagctatagactctcccctccttggccccgttaacgcggagcccccgatgttgggatctgggcatgcgttccgctgcctgtattttcaaaagtggggccgggctcaggcagcatttgccaaaccaacaacatcatttccctcctgggaggcagactcagtcaggtacaaggagtcccttattctgcccccacaatctccccctccccggagcacaacagagccctgcttcatcctcctctcctagcctcttcttccaactgtggagcaggagaaggaccccctgtccaaggtatggcattgaggtacaaatggctccaagaccagaagtcacccaggcccaggattattcttaggagctgcctacgatgggtaacagatccagacctcccaggggacagactttgcagacgccaccaagcctggtcagcgacctctctccaagccccctagaaaacagccatgtggggtcgaagagagtgagccacccagactcaggcactgggctactcaatgttaattctgcagccctggctgggcgcggtggctcacgcctataatcctagtcgtttgggaggctgaggcaggaggatcacttgaggccaggagttcaagaccagcctgggtaacatagcaagtccccttctcttaagaaaaagaaaaacattgtactatagtcccagctactcaggaagctgaggcaggaagatcccttgagcccaggaggtcaaggccacagtgagctgtgatcgtaccactacactatagcctgggcaacagagtgagaccctgtctccaaagaaacaaatatttttctgttttaaaaatcctgaagccttgagagcgtcacttcaccctcagcctccttgtaccaggctgcagctatgccagctgacgcagagagcagagtcccagccctccaccagcgtgttcagcatgaggcaggcaggcacacccagatagcagcgtcccagccctctgccagcatgttcggcatgaggcaggcaggcgcactgtcattccttcctttcttcactccttcacccacccctctgtgcacagagccctgtgccacttcactgctctgcccaccccatgcacccacccacctcgtgcaccaggggtctgcaagataaaatacacagcaggtaaatcagccgctgttcatgcctgcaaaggttccatgttctgttcccagcttcccccacgccacgagccagaccctgctggccaagttcaaacagcaacatgaggacaataagtacttcctgggcaccccggtcatggagccagctttcatcatccagcacttcgcagggaaggtgaaatatcagatcaaggtaggtgtctgcccatcaccactggtggaagcctgagggaagccacagtcagcccagaagcccatgtgggaggatcctcctgtgggcgaggttccagggtgctcagaacccaccgcgaatccccggctccaatgtccaaggcgccatagttcaagaactgccatttgcacttaggatgggccccaccccaccgtcagcccttcctgcgccagcccggggtctttggtaggcgccggtgagtgactatccccgagtgaccgcccacatccatcccccaccaggacttccgggagaagaacatggactacatgcggccagacatcgtggccctgctgcggggcagtgacagctcctacgtgcgggagctcatcggcatggaccccgtggccgtgttccgctgggccgtgctccgggctgctatccgggccatggcagtgcttcgggaggccggacgcctgcgggccgagagggccgaaaaggctgcaggtgggagctggggcgtgaacccacaaaagcgtcactgtcgagaggggggcacatcctgagttcatcttaaagtgaacacttcagtggcatttagtacattcattatgttgtgcaaacgccacctgtctacctgaagtgttcctgtcaccctgaacagaaactcgacctgcgtgtgtaatttaacctcagggcatgctatcagcaactccatcaggcgtctcctttgcaaatgatgccctctgatcccactggccctgggagtttgctgattgtgataatgtagctcttcctagtgttttgcctcttgtttctctctctctgtcttgctctttttttttttttttttttttagagacagggtctctctctctctctctcttgcccaggctctagtgtaatgacgcaatctcggctcactgcaacctctgcctcttgggttcaagcgattctcctgcttcaccctcccaagtagctgggactacaggttaccgccaccacataggctaatttttgtatttttagtagagacggggtttcgccctgttggccaggctggtctcgaactcctgacctcaagtgatccgcccgcctctgactcatgaaatgctgggattgcaggtgtgagtcaccatgcccagccccagcctcttctcttaactgagcattctctactgggaacccagcctcaaagggacatttctgttcccccgtcctagacagagatggtttgaggcagggggtgtgcctgatccactcaagacttgggccagccctatagagttgctgatagaaggatggcagaaagctatgtcctcatttttcccagaggcaacctgaggcctgcatggttgagtggctcacccaggtctaagggctccaaccttccgtcctcagcttcagtttcagttatcagctgtggcttctgtctccggaaggggcttcatgaaaaggaggaaggataaagctttcctgagaaataggaaatagtgctctgttttggggatccaaaacttcacagttacccacccaactttgccccaaacttgagtgatgagctgcttttttttttttttttttttttttttgagacggagtcttgctctgtcgcccaggctggagtgcagtggcgcgatctcggctactgcaggccccgcctcccgggttcacgccattctcctgcctcagcctcctaagtagctgcgactacaggcacccgccaccacgcctggctaattgttttgtattttttagtagagatagggtttcaccatgttagccaggatggtctcgatctcctgacctcacgatccgtctggctcggcctcccagagtgctgggattacaggcgtgagccaccacgcctggccaatgagctgctttttaagatcggtctgccaggtgcagtggctcaagcctgaaatcccagcactttgggaggctgacgcagacgatcgcttgaggtcgggttcaagagcagcctgaccaacatggtgaaagcccatctctactaaaaatgcaaatattagccaggcatggtagtgcatgcctgtggtcccagctaccacagggaggctgaggtaggagaatcgcttgaacccgggaggcggaggttgcagtgagccaagatcatgccagtgcacttcagcctggatgacagagcaagactccgtctcagaaaataaataaataggccggacacggtggctcacgtctgtaatcccaacacttcgggagaccgaggtgggtggaccacgaggtcaggcggttgagaccagcctggccaacatagtgaaaccccgtctctagtaaaaatacaaaaaattagccaggtgcagtggcaggcacctatagtcccagctactcaggaggccgaggcaggagaatcacttaaaccggggaggcagaggttgcagtgagccaagatcgcgccactgcactccagcccaggcgacagtgcaagactctgtctcaaaaaaataaataaataaataataaattaattaattaattaattaaaagatgggtcaaagtgtctgggtacaatggtgcacaccggtagtcctagcactttaggaggccaagacagctctcttgaggccagctatttgagaccagcctgggccacatagtgagaccccatctctccagaaaagttgaaacttagtcatgtgtgtcagcatgtgcctgtagccccagctacttgggaggctgaagtaggaggattgcttgagcccaggagttggaggttacacgagctgtgatcgcaccactgcactcggcctaggcaatgcagcaagaccctgttggtaaaaaattaaaaaaaaaaaaaaaaaggttggggggtgttgcagagactcatgcctataatcccaggattttgggaggccaaggtgggcagatcacctgaggtcaggagttcaagaccagcctggccaatatggcaaaaccccgtctctactaaaaatacaaaaattagctgggcacagtggcctgtagtcctagctactcaggaggcggaggcaggagaatcccttgaactcaggaggcagaagttgcagtgggccgagatcgcgccactgtgctccagcctgggtgacagagcaagactccatctcaaataaataaataaaatgggttaaaataattgcagcctccataggaggccatccccaccaccatccactctgtgtctccggcaggtatgagcagccctggtgcccaaagtcacccagaagagctgccaagaggagccagcaccccttcggaaaaactttaccggtgagcaagaccctgatttgcccaaactgaaatcattaggtggcagcagcattgtttcaaacaacttagggaatgctacattcttttttttttttttttttttcttttgagatggaatttcgctcttgttgcccaggctggagtgcaatggcgcaatctcggctcaccccaacttccacctcccgggttcaagcgattctcctgcctcagcctcccgagtagctgggattacaggcatgcgccacgatgcccagctaattttgttttgttttgttttttgttggtttttgtttgtttgtttgtttttagacagagtcttgctctgttgcccaggctggagtgcagtggcgtgatctcggctcactgcaggctccgcctcgcaggttcatgccattctcctttctcagcctccggagtagctgggactacaggcacccgccaccacacccggctaatttcttttgtatttttttttaactagagacggggtttcaccgtgttggccaggatggtcttgatctcctgacctcgtgatccacccgcctcagcctcccaaagtgctgggattacaggcgtgagccactgcaccctgcctaattttgtatttttagtagagacggagttactccatgttagtcaggctggtcttgaactcctgaccttgggtgatccacctgcctcagcctcccaaagtgctgggattacaggcgtgagccaccagggaatgctacattctaaacccaggtcgaggttgctctgaataagtcactgagcttccatttgaaacagaaagacccagaaccaagcagcatttggtggctgcttttctggacacagaatagcaggccgtggtgcatcatgcgctttagggagatgggaggaggctcagtttacaaaggatccattttatggcctagggtgggcactgggaggtagagcccaagcatcgatggtggtgcggagagacgggcttgattgattggagagttcttcccccatcctgcctggagtggcccaaaagtagttctgccaagttacttcattcacagtcagaaacacatacactttgatattgcacatgagatgacacggggtcttttgtggaccctagcaatgaccaagggccctgcacgcacccaagcatgtgccagcaccagggtagaaaagtgagcaggctggccagacgtgatggtgcacgcctgtaatcccagcactttgggagaccaaggcgggcggatcacttgaggtcgggcgtttgagacccgcctggccaacatggtgaaacctcgtctctactaaaaatactaaaattagccaggcgtggtggcgagtacctgtagtcccagctactcgagaggctgaggcaggagaattgcttgaacctgggagatggaagttgcggtgagccaagatcgcaccactgcactccagcctgggtgacagagcaagactctgtctcaaaaaaaagtttttggaatcacctttttcacccaaaatgggacacaagtaaggagaatgcattcctctgttgtttttgtttgttggtttttttttttttttggtcccccaagttcccaacagctagaaacttccttctatttcattgtgtgggttgcatttttgttttgttttgttttgcttgagaccaggctattgtgcagtggtgtaatcacagctcactgcagcctcaacctcctgggctcaagcaatccccccacctcagcctcccaagtagctgggacaacaggcacacgccaccacgcctggcttattttttcttttataaagacagggtctgattatgttgcccaggctaatctcaaactcctggcctcaagccatcttcccacctcagcctcccaaagtgatgggactacaggcatgagccaccacacccagtcctcttttttttttttcttgcctccgttaccccaaagacaaagtgacttctgacctgcggtagcagaagcagcatccatctccccagggcctggccacagggctgcaggtcccgcccaaggagcatgttaagtttatacagattctccctttcagctgctcaatgctagatttctcatttgacggctctgaggagttcgatattaacgcttttgaggacatcattgctttctatgaaagcaagaagtaagtgcagaaagggcctttgatcccgaggccagcaaggcaccaaggggagccatcttccccaggtgctcagtgctgcgtccaggacacagacagagaggactggccgttcagggaatgccagggcctgcaagggccactcctgccagatttgcagatttagccaggtcggcagggctgcgggtgggccaaagtcatgggcctcattccaagccgtggccgctgcactgaccaccctgggtgtgaaggccactcgcatatagaggtgacaggcgacccctctgttgcctttgctctgcctccctggagggctggggagagcaggtaagtggggccatgggggcacttggcatggtgcatggagcacaggggctggggtcgggtccttccaggccacctgccgagagctaaaacatgtgctttgaacgactgccagcaggatgcggtagcacgcacctgcaatcccagcgctttgggaggccaaagccggaggatcacttgaggccaggagtttgaaaccagcctgggcaacatagcaagaccacacgcctacaagaaaaaataaataaaatgtctggaataaggaattcaaaaaaaaaaaaaaagcaggaaaaaccagatcctcatttctagaagttctgagttctgtcaaaaacatttgtcatttagacattcctcactaatatttagtttgaaagcatccagttttcatctctaaggcattctaattcacacacggtatcagtgccaaagtttgcacctccgcgtgcgtgctcaagcctaagcccacagccatcaaacaaaatgaagcgagtaaggttgagtgctttgagggtaattatccccttaaactagggtttctctggccgggcgcagtggctcacccctgtaatcccagcacttgggggaggcatacgtgggcaggtcacttgaggatgggaattcaagaccagcctggccaacatggtgaaaccctgtgtctactaaaaatacaaaaattagccaggcgtggtgtgcacctgtaatcctagctactggggaggctgaggcaggagaatcacttgaacctgggaggcggggtttgcagtgagccgagatcacaccactgcactccagcctgggcaacagagcaagactctgtaaaaaaaaaaaaaaaaaaaaactagggtttctcaacctcagcactgtgccagatcattctctggggtgggcacccgtcctgtagactgtagggtgttgagcagcatccctggcctccacccaccagatgccaggagagcacccccacccccaagtcatggcaaccacaaatgtctgcagacattggcagatgtcccctgatggggatggtaccgccccggttgagaactgctgtgttcaaactgtggctcttgtattcaaattaattcctccaaaggccttaatgaagccaacaaggagattgacatctggccacaaaatcatggagagagactaatttgctcctcccacagagaccctccctagggtcttttttctgagtcgccccaactgatttttttttttttttttttttttttagacagagtctcactctgttgcccaggctggagtgcagtggtgcgatctcggctcactacaacctctgcctcccaggttcaagcgattgtcgtgcctcagcctccggagtgactgggactacaggcatgcgccaccatgcccagctaatttttgtgtgtttagtagagacggggtttcaccatgttggccaggctggtcttgaactccctacctcaggtgatctgccctgctcagcctccgaaagtgctgggattacaggcatgagccaccgcgcccagcctgtcatggaatttaaaaaataaataggctgagcagggtgatgcatgtctgtaatcccagctactcaggaggctgaggcaggagaatcgcttgaacctggaaagtggaggttgcagtgagctgagatcgcaccactgcactccagcctgggcaacagagcaagacactgtttccaaaaaaaaataaaataaaaataaaaataaatttaaaactaaataaatatccccagccaggcgcggtggctcacacctgtaatcccagcactttggaaggctgaggtgggccgatcacaaggtcaggagttcaagacctccctgaccaacatgatgaaaccccatctctactaaaaatacaaaaattagccgggcatggtggtgcacgcctgtaatcctagctatttaggaggctgaggcaggagaattgcttgaacccaggaggcagaggttgcagtgagctgagattgcgccattgtactccagcctgggcgacagagtgagactccgtctcaataaataaataaataaataaatatccccaaaggctcttaaatatgagaactttttcagtgatccaaatgaaaaggatcgaataaagtggaatgaccagatggaaataatttttttttttttttttttttttttgagacagagtctcgctctgtctcccaggctggagtgcaatggatggcactatctcagctcactgcaacctctgcctcccgggttcaagcaattctgcctcagcctcccacgtagctgggattacaggtgccctccaccatgcccagctaactttttgtatttttagcagagatgagtttcgccatgttggccaggctggtctcgaactcctgacctcaggtgatccacccgcctcggcctctcaaagtgctgggattacaggtgtgagccaccgcacccagctggaaatgatgtattgaaaaggatcaatgatctgtgttgccaagtccaatttgcctcaaagccctgccccgctccagggcttggggaggctggcccagtccccatttctggcaaaagagagaggggcagcattgagcacagtgtctttcccccagctgcatgttttggcttcagtggcctggggatggtcccaatggcgctgggaaccccgaggtggcaggcctgcttctaactccatcttctttctgtcactgcgccccctccacccctcccctcagcgatttgcataaccaaatgatcaagagcatcaaaggattgccctggcagggcgaggacccccgtagccttctccagtccctcagtcggctccagaaaccccgcgccttcatcctgtgagtcccccaccaaggccctgcttacaagtgcgacaaccgcctcccactactcctgcgaccccggcggggcctgcagtcttcctaatttgcatcggccactaaaaccacagtgctgtctcatggcccacccccagccatcactaaatgccaatcaataacacccctggcctctgtctgcactgtggcccaggcacagccggcttcccagcacacggggcagcttcccaggagcactccttcttcgaggcatctaattttccacccgcaaacgtgccatcctccgtctcctccccgtgcctatctggcttgcagagcaaagcttgctcccgcctttgccactgtgagtttgcagagaagccatctgcagcagggcatgcgatttcccagagagggtggccctgatctctgcaggtggccacataagccagtcaggagagcccagaaggtgcataaaccggtttgggatcccgactgttagcacactgtgggattgagtagtctctgctttcagcctgcaaatggggtaatgactctcatgcttccattatgctgacccagcaccaggcaggcagcagcctcagctgacaagacatccacctgcggtcaccacatctcgccttttagtggccattggggtgtgggctggctgagagcaaagcttgcacctgcatgggagccaatgagagccagtttctttctttctttctttctttcgttcgttctttatttcgttctttcgttctttttttgagacggagtttcactcttgttgcccaggctggagtgcaatggtatgatctcggctcactgcaacctctgcctcccgggttcaagcgattctcccacctcagcctcctgagtagctgggattgctaacacctgccactacttccagctaattttttgtatttttagtagagatggggtttcaccatgttggccaggctagtcttgaactcttgacctcaggtgatccgtctgtcttggcctcccaaagtgctgggattacaggcatgattcaccgcccttttttttttttttcttttttaagagatgggggtttcattctgttgcccaggctacagtgcagcagtgaaacgatcaccgctcacggcaggttcgaccttctgggctcaagcaatcctcctgcctcaacctccagagtagctggaactacaggtgcgcattaccacacctgtctaattttattgtttgtagaggtggaatcttgctatgttatagcccaggctgtcaggctggtctcaaactcctgggctcaagcgatcttcctgcctcagcctctcaaagcactgggattacaggcatgagccaccgcacccagtgggagcctgtttaaaacttctgttccttttttttttgaggcagagtctcactctgtcgccaggctggagtgcagtggctcaatcttggctcactgcaacctccacctcccgggttcaagtgattctcctgcctcagcctcccaagtagctgggattacaggtgtgcaccaccacacccgactaatttttttctgtttttagtagagatggggtttcaccatgttggccaggctggtcttgaactcctgacctcaaatgatccgcccacctcggcctcaaacttttgtccttgttgtgccttattttaccccacagggattcaggtgaaactgaatgcaaccacggatggctaggcatctcacagatctacaagttaccatctccttagccggtcttcaaaaggcaccaggccttttgaataaataaatatatttacttatttatttattttcccccttggtctgcaagattccataaggtgtctgagaacacaggagctatccccttccttacctcggccaaaagagcagctttgggttttggggggggttttgagacagagtctctctctgtcacccaggttggagtgcagtggcacgatctcggctcactgcaacctccgcctcctgggttgaagcagttctcctgcctcagtctcttgagtagctgggattacaggcacccgccaccacacctggctaatttttgtatttttagtagagacagggtttcaccatgttggccaggctggccttgaactcctgacctcaggtgatccgctcacctcagcctcccaaagtgctgggattacaggcgtgagccactgcgcctggccagctttggttttcttctttcccaccagcatgatcctgaaaggagctcccacccaggccccattttggttattttgcagggcaagtccctgccctgccagcagagggttccagaagggcctctgtgggcctgcttggcatctaccagcacatggcaaagacagcctggtcacctggtcaccaccaggactgctcaggctccctccgccccactcggcatcctgctgtgatctgggggatatgtcagttcctccatagcaagccccgctggatgcacgtcccaccctgtagattcctagccagcccctcctacttctcagacatccgaatggcccccagactaaacactttactcagctttggggcagccaccagcagagtccgggtgccgccaacccagggaaactggtgtccacagacagtggctgaggcacgccacggtgtgcagcgtggagaggtggcggtggccttgttgcacttgcgccttctcactctctcccctctctctgtgtctctcagtctaacccgccaggcgtggcttgctgaactaacccaaatcccgacactgtgttccttttgttcacaaaaccatttttaatattttgacaggaaaagtaaaggtatcaaacaaaagcagatcattccaaaggtaaaaaaaaaaacacaccccgcgcgacacgttccaagatatcttgcttctctgcccgtcttgagagctttcacttctgcaacttcatttcctcctccttcccactatctccccctccctccaagaaaaaaaaaatgttctcgtgttgagatgatttagagctgtctctttatgggtttcccagaagcagggtctgagatggggtatttgcacacacagcggcttatggaagagggcttacgtgagaaggcagagagaaggggtgagggaggaagctaggggcgtaagcatagctgaagtctggcctcagcctggtcccatggggagctctagtgggttcatagcaccacagagctcatcctgccccaacgtaatgggacccttccgtttaacacccccatcttcagtccctggctactgggctgcttccagacaggacagagaacctcccaagcgctctgtctcgtttccacatacaagtgcagcaatttaagaaatttgcaagaagagtaagaatagccttgcagtctagttagcagatgggagagggctaattcctcttgtcagctgatagaactggctgacacatgatggtggcctgtccgatgagctcatgcggatggcacagaaaggacctggcccttcttgactcaagtaatgtaaactgtaggagctatgcagaggagagggacggccaggttcagtagcactggcttcctctctaacccagaggaagaggaaatggggcagccactcaggctgtgaaagaggctgtcatcagccctcccggaaccagcgctgtgtgcaaggtgcaaacccacctcattccactgggcccacatcaatagtgtggtcctgagaccaaacctaagagctgctgcccgggcactcgctgcggggacgctgttctgccctggcttcggggacacctgtgatgcctccccgtgcccgtgtgggctgtgggagggcaggccggaccccatgtgtctgtcctagaacctactggactccaagtccctgaaactcatcatcagcatgactctgcacgaccgcaccaccaagtccctactgcacctgcacaagaagaaaaagccaccaagcatcagcgcccagttccaggtaggtggagcaggagaggcagaaggtggcggtcagctcagcctcaggcttgtgtagcttcacccgacaccgagcacagcccgtctctagtaaaaatacaaaaattggccgggcgcggtggctcaagcctgtaatcccagcactttgggaggccgaggcgggcggatcacgaggtcaggagattgagaccatccttgctaacacggtgaaaccccacctctactaaaaatacaaaaattagccgggcgtagtggcgggtgcctgtagtcccagctactcgggaggctgaggcaagagaatggcatgaacccgggaggcggagcttgcagtgagccgagatggcgccactgcactccagcctgggcgacagagcaagactccatctcaaaaaaaaaaaaaaaagatacaaaaattagctgggcatggtgggcacctgtaatctcagctccttgggaggctgaggcaggagaattgcttgaacctgggaggcggaggctgtagtgagccaagatcacgccattgcactccagcttgggcaacaagagcaagactgcgtctcaaaaaaaaaaaaacaaaacaaaacaaaaaaaacactacatccgtggtcccttctgaggttgacacatgtttcaaatctccagaaagcgtttgtctggtcctccccagccccagccttccacctgaggcaaaaacaagcactggtggccctgggaccatggggaccacataactccctcgagggtttccagggatagcgcaggcttgggtcagaacgtccagctggaacctcctgtgtcccaccaccagggacccacatctgtgcagaccccatccaccccacactgatgctagagtgtcccaggtctgctcccacagaacagcggctgtcagggtccctgattcaacccaaatgctttctctttcccttaacagacatcccttaacaagctcttggaggcactggggaaggcggagcccttctttatccgctgcatccgttccaatgctgaaaaggtgagtttctctaaggtgtttgggaggagaaggcccatgccggactcttaggggtgtcggtgtccctgcatccagccccagcctccacgcagtatgggggacggtgcagcagtccatccagaggcagccggggatggagaattagcagtgaggatggtccaagtggccatttaagagcagggacatcatctggaacatggagaggcccagagaaggtttgattagggagcgacaggtcaggggtgcttttcagatacatcccaaagagtagccggtgcaaggagtctaccagaaggcagaggctgagattacatagcagagtctcagaggcacacacagcccgctgctcacattacaagtttctagagagacccttggagcccccgtgggaccaccagcaggggctccaggctcagcactggcacaggcttcctttaccccagaggtccactccatccctgggaggacagctcggggactttgccagggactgagcaggagtgtgggctcccagacaaatgtgagcacacagccaggcaggaacctcccgccaactgtacctggggagatgctccgtagtgcaccttctctgctcgtgggctgtgccagcagatgattctctgtgataaaacccattttgtgcactggagggtggcagcatccctggcctccacatccacccccagtcatgacaaccctcctcattctttcccgtttgcctttgtttgtttttgtttgtttgtttttgagacagaatctccctctgtcacccaggctggagtacagtggtgcgatctcggctcactgcagcctcgacctcccaggttcaagccatcctcctggctcaccctcccaaatagctgggattacaggtgcccaccacgccaagctaatttttgtatttttagtagagacggggtttcaccatgttggccaggctggtcttgaactcctgacttcaagtgatccacccatttcagcctcccaaagtgctgggattacaagcgtaagccaccgcgcccagcaccgtttgtctttatagcaacaccatgccttatcccttactgcccaccagagtgaagtccagacccctaagctccaggcttaaagcccactgaggcagctgcatttccagcctcttctctcccctggcaggaagcatctccctgtgtccccatcagacccttggcttcttccttctcctgtgggcctccacccagctgttctctgcctgttccctcctcaggacacagcccagcatctcctctctcctgggacacctcccatggggtgctgggctttgtccgccccatcacctgtgtgtgactcctgaccccagaccaagctctcctctccaccgaatccccagcacttaccccagtgcctggcagagaacaggcccggaacactgggctttgtccgccccatcacctgtgtgtggctcctgcccccagaccaagctctcctctccaccgaattcccagcacttaccccagtgcctgccacagagaacaagcccagaacagatttgcatttgggttctttttttttttcttttcttttttctttcttttttttttaaaaaataaatttaaatgactagagatggagtctcactatgttgcccaggctggtctcgaactcctggcctcaactgatcctcccatcttggcctcattccagaaagagtgtctggagcaaggacggaccccttgtccaggtgctcctggctgccgtgccgtagaacactcccaggtcggctagccagcacccacgtgtgcaccctgaccatgtctgtgttcggcatcccaagaggcagtggtcgcatggggaagtgccctcatctcacagttcccaggcctgagccagcaacagacttgggcatcctgtcaggtcaaggccacctgcctgatgtctcgcattcccatttcagaaagagctgtgctttgacgacgagctggtcctgcagcagctgcgctacaccggcatgctggagaccgtgcgcatccggaggtcagggtacagcgccaagtacacgttccaggtaggccacaagcacatatacctggacacacctgttccgtggcaaaggcaatcaccctcttccaaagagagctccttgctggagtgtaaactcagcaggttggccaggtgcagtggctcacgcctgtaatcccagcaccttgggaggctgaggcaggcggatcacctgaggtcaagagttcaagaccagcctgaccaacatggtgaaaccccatctctactaaaaatacaaaaattagccgggtgtggcagcagctgcctgtattcctagctactgaggaggctgaggcaggaggatcccttgaatccaggaggcagaggttgcagtgagccaagattgagccactgcactccagcctgggcaacagagcaagactccatctcaaaaaaaaaaaaaaaaaaaaaagaagaaacccctgcctcatgccaagagctagtacctgtgtcaccctgagcccaaagccagaggtgacagcgcctggttccctttcacgctttcccttcatagccccagggactagaatgtaatgtgcctcttttctcatccactgaatagaaatagtgtctttctaatcctatgcggataagaaaagcaaaattataaaaaatgcagaaatgctggtgtattttaccagtgcttggcccttaaatatttgaaataataatttactcaaaagaaatgttctgggcgggtgtagtggcacacgcctgtaatcccaacactttgggaggccaatgcaggaggatcaattgagcctaggagtttgagaccagcctggacaacatagtgagaccccatctctgcaaaaaatttaaaaatcagctgggcacagtggctcacacctataattccagcattttgggaggccaaggcaggtggatcacttgagatcaggagttcgttaccagcctgaccaacatggtgaaaccccgtctctactaaaaatacaaaaaaaaaaaaaaaaaattagccaggcatggtggggcacacctgtaacctcagctacttgggaggctgaggcaggagaattgcttgaacccgggagatggaggttgcaataagccgagatcacgccattgcactgcagcctggccaacaagagcaaaactctgcctcaaaaaaaaaaaaaaattagccagacaaggtggtatgcacctgtggtcccagctactcaggaggctgaggtgagaagatcacttgaacccaagtagtttgaggctacagtgagttatgactgagccactgcattccagcctggatggcagagcaagaccctgtcttaaaacaaaacaaaacaaaacaaaactagaggcccagtgtggtggctcatgcctgtaattagcactttgggagggcaaggcaggcagattgcttgagctcaggagcttaaaatcagtctaggcaacatggtgaaaccccgtctccacataaaaatacaaaagccaggcgtgctggcatgcaatgtacttccagctacttgcggggctgaggcaggaggattgcttgagtctgggaggttgaaggtgcagtaagccatgtttgcaccactgcactccagcctgggcaagactccgtctcaaaaaaaaacatgttcctccagctacaatctaactcccccacaagtcctagactgtaagccccattgcaagggtgactgtggttcccagccacctcgaccatctaaaagatctaggaccttgtatctgcagtggtctttcttaagattacagactgttggctgggcgcagtggctcatgcttgtaatcccagcactttgggagcctgaggcgggcggatcacgaggtcaggagatcgagaccatcctggctaccacggtgaaaccccgtctctactaaaaaaaatttaaaaattagccgggagaggtggcgggtgcctgtagtcccagctactcgggaggctgaggcaggagaatggtgtgaacccgggaggaggagcttgcagtgagccaagattgtgccactgcagcccagcctgggcggcaaaacaagactccgtctcaaaaaaaaaaaaaaaaaagattacagactgttgacctggcatggtggctcacacctgcaatcctagcactttgggtcacgtgacccatttaccactgcacccagctgagaacccatttctttggttttttgtgtgtgtgatgggggtggtgcagagccttgctctgtcgcccaggctggagtacagtggtgtgatctcggctcactccaacctccatctcccgggttcaagtgattctccttcctcagcctctccagtacatggggttacaggcgcctgccaccattcctggctaattttggtagagacagggttttgccatgttggccaggctggtctcattggttgagctcaggagttcgataccagccttggcaacatggcaaaaccctgtccctacaaaaatatttttttaattagctgggcatggtggctacaggactatgtgccgtagtcccagcttccagggagactgaggcaggaggctcacttgagcccaggaggtcaaggctgcagtgagctgagatcacaccactgcactccagcctgggtaacaaagtgagaccccgtctcaaaaaaaaaaaaaaacagactatttcttttttttttcttaagacggagtctctctctgtcgcccaggctggattacaatggcgcaatcttggctcactgcaacctccgcctcccaggttcaagtgattctcctgcctcagcctcccaagtagctgggactacaggtgtctgccaccatgcccggctaagtagagatggggtttcaccatgttggccaagctggtctcgaactcctgacctcaggtgatccacacacctcggcctcccaaagtgctgggagtacaggtgtgagccaccacacccggcccagactatttctgaaagcctgaaattttagatttgtcattaccattcctgtcaaacccagcttcaccttaaccagggtcaccagatctctgtctcctcatcgctggccagaacactcacctagattttcctttctccacccaaataacctaggatttcaccgagcagttccaggtgctcctgcccaaggatgcccagccctgcagggaggtcatctccaccctcctggagaaaatgaagatagacaagaggaactaccagatcgggaagaccaaggtcagcgctcctgcccctcggggcactacaaacccacaccctgccttccaccgcacaccgtgtctccccaggcccccagggccactctctgaaacatacagggctctgtctaggaaatgcatttctcgggacccagcagagcactgcacctaagggataggggccgccctggctgagccccacctgctgttcttcagcagggctcagcgactccctccgcgtcacctgtttattgctgcctcacaggtaggaaagggacgatcgtgctaactggcaggatttaggagatggtcagtcccctttacggtatgaggcaggaggtggcctgcacttgtcctccctttcagagactgtctcccatctctgggcatgtgtttgcctcttgctatgggagcattactcagccacccttgtttaacaagcgccaaggtcagtccccctgaaggcctcacctggtgtaaaaaattcccttccagccaagcgaggtggcatgcacgcagagtcccagctacttgaaaggctgaggtgggaggatcccttgagcccaggagtttgagaccagcctgggaaacatagcgagaccccatctctatacaatatttaaaaattagccaagcgtggtggcatgcacctgtggtctcaactgcttggcaggctgaggcaggagtttgagactgcagtgagccctgattgcaccactgcacttcagcctgggtgaccgagcgagatctcatttcttttttcttttttgtttttatttttgagacagagtcttgctctgttgcccagacaggtggtgtgatctcagctcactgcaacctccgtctcccaggttcaactggttctcctgcctcagcctccaagcagctgggattacaggtgcccgccaccacacctgactaatttttgtatttttagtagagacagggttttattacaggcacacacctgtagtcccagctactcgggaggcttaggcagaagaatcgcttgaaaccgggaggcggaggttgcagtgagctgagatcgggccactgcactccagcctggtgagactccatctcaaaaaaaaaaaaaaaaagggggggccacagccaggtgcagtggctcatgcctgtaatcccagcatttttgggaggccaaggcgggcagatcacttgaggttgggagttcgagaccagcctggccaacatggtgaaaccctgtctgtactaaaaatacaaaaattagccaggcctggtgatgggcacctgtagtcccagctactcgggaggctgaggcaggagaatcacttcaacccagtaggcggaggttgcagtgagccgagatcatgccactgcactccagcctgggcgacagagtgagactccatctcaaaaaaataataaataaataaataaataaagccctggttggtcagcacaccagcctaggtctcactctggagtgggctatgcagacctcccaggcacagagatggtgtcaggggcagtgcagctgaccccacctgaccccgtgcccaccaggtcttcctgaaggagacggagcggcaagccctgcaggagacgctgcaccgggaggtggtgcggaaaatcctgctgctgcagagctggttccggatggtgctggagcgtcggcacttcctgcagatgaagcgggccgccgtcaccatccaggcctgctggcggtcctaccgggtccggagggcgctggagaggacgcaggctgccgtgtacctccaggcctcatggaggggctactggcagcggaagctctaccggcaccagaaacagagcatcatccgcctgcagagcctgtgtcgggggcacctgcagcgcaagaggtgagcagagccgggccacgctcctcggaatattccagaagccaaaaaggtcactcaccaaattgctgcccgtgatataccatctggcctgtggcactaaggggatgtcattctggacacagggaaaggctggtgggaaaccagatgcctaggcactcatgggctgcagagaagtgctccaaggctggcaggcagcactcagggacaaagccctgctttgccattggctgcacccattctctgcccagggactcccctgtacctggatcggtcagggaacacctggattcagggttggaggggctgcctggaccagcccaacactcacatggagctggggcatccaccgggcacagagaagcccccaggaggatatcagcagctcccgtcccagcacccacagctccgagcccagcccctccccgacctaggcaccctgttcacctctcccctgcccacacagacccagctctgccacaagtcaggtcccagctcccggagcaggccctacccacacatgcaaaagcctcctaggccaggtgcaatggctcatgcctgtaatcccaacactttgggaggcctagatgggaagatcgcttgagcacaggagttcaagaccagcctggccaatatagcaagatgccatctctacacaaaattaaagacttagccaggtgtggtggtacacacctgtagtcccagctattcaggaagctgaggtgggaggatcacctgggcctgggatgtcgaggctgcagtgagctatgatcacaccactgcactccagcctaagtgacagagccagacactgtctctaaaagcaaaacaggctgggcatagtggctcacacctgtaaggccagcactttgggaggccaaggcaggcagatcacatgaggccaggagttggagaccagcctagccaacatggcaaaaccccatcttacgaaaaatacaaaaatttgccgggcttggtggtgcatgtctataatctcagttactagggaggctgagacacaagaatcacttgaacccgggaggcagaggtcgcagcaagccaagatcgtgccactgcattccagcctggacaacagagcgagactctgtctcaaaaataaaataaaataaaataaaataaaagcaaaacaaaaagcctcctagaaaaagacccaagggaaagcccacagtggaccccaaaggagtttgaggcttcttaatagaacccacccaccacagccccaacaagggtcctctcccctaacaaggcagccaggcagacgcagggcaggggtatctgtgacactgagggggcaccaccctcagcctcctttcctgatcgaggagattcctgctttccagaagcatctctcagggccactgggcacaggcgaagccccgtctgcagcccgcaggctgggggtcccatcggaactcagtgggaggtggagggagtgtttgtttctgaaccagctgtctgctttttcctcactccagcttcagccagatgatctcggagaagcagaaggcagaagagaaggagagggaagccctggaagccgcaagagcaggtgctgaggagggcggacagggtcaggcggctggagggcagcaggtagctgagcaggggccggagccagcggaggatggcgggcacctggcatcggagcctgaggtgcagccaagtgacaggtcccccctagagcactcctcacctgagaaggaggccccaagcccagagaagactctcccaccccagaaaaccgtggcggctgaaagtcacgagaaagtccccagcagccgggagaagcgtgagtcgcgtcggcaaagagggctggagcacgtcaagttccagaacaaacacatccagtcctgcaaggaggagagtgccctcagagaaccttccagaagggtcacccaggagcaaggggtgagtctcctggaagacaaaaaggagagcagagaagatgaaacccttctagtcgtagagacggaggctgagaacacatctcaaaagcagcccacagagcaaccccaggccatggcagttggcaaggtctctgaagaaactgagaagacgctgcccagtgggagccccaggcctggccagttggagcggccgaccagcctggccctggacagcagggtcagcccaccggcccctggcagcgcccccgagacccccgaggacaagagcaaaccatgtggcagcccaagggttcaggaaaagcccgacagccccggaggctccacgcagatccagcggtacctggacgccgagcggctggccagcgccgtggaactgtggcggggcaagaagctggtggccgccgccagccctagtgccatgctcagccagtccctggacctcagcgacagacaccgggccacaggggccgccctcacgcccacagagtaagccccacaccctcttttgtctgagcaccagggtccaggccaggtgggcaaggccaggggcagtgccacacatcctggaaacacatgtgtaatcatgcccagtgggtgtgcgggaggcctgagggaggaggacgagcaggacatgctaaagaccaagtgaagacaaggcagccagccagggcccaggctgggacctggagccttgaggggtccccagaaggagctgtgctcacacagaaaggccccggccttgagagaggtggctcctcaggtcaaggtccctgctgcccagaaatcttgggccttggtttctaattggtgaacaggactaactgcactcctcggggttaaaggagcaggggcttgctctgcctgagccttagtaagccaagtgtcagtgacttggaatctccagctccctcttccagagggcctgcaggaccaaaggaaagaaatcagggaggagacaggccttccctgcagcaggcctgctcagcctcccactgctcgtattgggggccagatcattctctgcggtgggggctgtcctgtgtatcataagatgttgagcagcatccctggcctccacttaccacatgccaggagtattatcgatagatgatggatggagggagggagggagagagagagagagggaaggatgtgtgggtgggtgggtgggtgggtggatggatggaagatagagatgatggaaggatggatggaaggaagatagagatgatggagggatggatggatggaaaatgatagaggtgatgaatggaagacagatatagatgatggatggatggaagatacacatgatggatgaagggatggatagatagaagacaggtagtaatgatggatagaggcatggatggatggatgatacagatgatggggagatggatggatagaagatgggtagaaattaggctgggcgcgatggctcatgcctgtaatcccagcattttgggaggccaagagtttgagaggagttcgagaccagcctggccaacatagtgaaaccctgtctctactaaaaatacaaaaattagctgggcgtggtggcgcatgcttgtaatcccagctacttgggaggctgagacaggagaatcgcttgaacctgggaggcagaggttgcagtgagccgagatcaagtcactgcactccagcctggatgacagagatgagactccgtctcaaaaaaaaaaaaaaagtagagattatggatagaaggaagatagatgccgacgatagatggatggaaggaagataggtaggtagagacaatgaatggagggatggaagataggtagagatgatggatggctgggtgggtggatggatggatggatggacagacagaaggatgggtggatggctggaagatagagatggagagatggaaggaacatagagttgatggatggagggatggatagatgataggtagattatggatgggaggaagatagagatgatggagggacggatgggtagaagataggtagagccgggttcgggggctcacacctataatcccaacactttgagaggctgaggcgggtggatcacctgaggtcaggagtttgagaccatcctggccaacgtggcgaaaccccgtctctactaaaaataccaaaaattagctggatgtgttggcgcatgcctctaatcccagctactcgggaggctgaggcaggagaatcacttgaacctgggaggcagaggttgcagtgagccgagatcacaccattgcactccagcctgggcaacaagagcaaaactccgtctaaaaaaaaaaaaaagatagatagagatgacagatgaagagatggatggaaggcagataaagaggatggatgggtggaagatagagacaatgagtcaatgagtagaaggatggatggatggatagatagatgatagatagatagatagatagatagatagatagatagatagatacatagatagatagatgggcaggcaggcagggtctcttgggctaaggcaaggtttcctaccctccacactcaacatctggggctggctcactctctggggtggagaccattctctgtagggtattgagtagcatccctgccctccactcaccagaggccagaagtacccacccactcctttccccccacccaagtggtgacaaccaaaactgtctctagacattgccaagtgtcccctggcaggggcagaactgcccaagtgagaacccaagaaccactaagacaagaaaatgccactgactcactctagtcagtaaaagccatgtttctgtgatctcgcagggagaggcgcacctccttctccacgagcgacgtctccaagctcctcccgtccctggccaaggctcaggtaacaacaacacggcaaaaccccgtctccactaaaaatacaaaaatcagccaggcgtggtggcgcttgcctgtaaccccagctactcaggaggctgaggcgagagaatcgcttgaacgcagtggcagggtagaggttgtagtgagcctcgcgagaccaggccactgcactccagcctgggcaactagagtgagactccgtttcaaaaaaaaaaaaagcaggaagtgaggtcggtggatggagtgtaaatgcctgcaggggcttccccatctagcacaggactgccagcctttccttagcagccccccactgcaccgtcttgcagcctgcagcagaaaccacggacggagagcgaagtgcgaaaaagccagctgtccagaagaagaagccaggcgacgcatcctccctcccagacgcagggctgtccccgggctctcaggtcgactctaagtaagtattgggcttgggggaaactcaggccaccagaggatgcccggggtccctgccagggcctcgcagcagtgtggcctcctaaaccaatcacgtttacaaagcacgttcgcaaaggcatttgctcagtagaaactgaatggggaggccaggcagtggctcacgcctataatcccagcactttgggatgccgagacgggtggatcacttgaggtcaggagttggagaccaaccaggccaacatggtgaaaccccatctctactaaaaatacaaaaattagttgggcatgatggcaggcacctataatcccagccactcgggaggctgaggcaggagaatcgcttgaactcgggaggtggaggttgcagtgagctgagatcatgccactgcactccagcctgggtgacagagggagactccgtctcaaaaaaaaaaaaaaaaaaaaaaagcctctagggcaggatccttcctgcctcttctggcttttgggggctccaggtgttccttggcttgtggctccatcactctaatctctgtctctatcggcacttggccttcccctcagtgtctgtgtcttctgtcttctgtcccttaaaaggacacgtggctgaatggatgcagtaggtcacgcctgtaatctcaacactttgggaggccaaggtgggatgatcacttgaagccaggagttcaagatcagcctgggcagcgtggcaaaatcttgtctctgcaaaaaaatttcaaaaattagccaggcagggcggtgcatgcctgtagtcccagctactcaggaggctgaaacaggaggatcccttgaggccaagagatcaagcctgcagtgaactgtgatcataccactgcactccagcctgggcaagagaatgacactctgtctcaaaaaaactttttttttaacttaaaaagataatgagctaggcgcatggcttgtacctataatcccaacaactcaggaggctgaggtgagaggatcatgctcgtgaggccaggagtttgaggctgtagcgagctatgatcacaccactgcactccagactgagtcacaccccaactggaacaaaaagaaaagaaaatggagtccccctgtggcttctgtttggtatccttctttcttcacataactcccctgccagtacaaagaaagggctattgctctttataagataatcctgtgttgtttttttgtttgttttttttttgagacagaatcttgctctgttgcccagtctggcagtctggagtgcaatggctcaatctccgctcactgcagcctccacctctcaggctcaagcgattctcctgcctcagcctcccaagtagctgggagtacaggtgtgcaccaccatgcccagctaatttttttttctttttttttctttttttttttttttgtatttttggtacagaaggggtttcgctatgttgcccagcctggtctcaaactcctgggctcagctgatccacccacctcagcctgccaaagtgctgagattacataggcgtgagccaccatacccagccagatccatttttgtttttgttttttgtttttttttttgagacagagtctcactctgtcacccaggctggagtgcaatggtgcgatctcagctcactgcaacctgcaacctccacctcctgggttcaagcaattctcctgcctcaacctcccaagtagctgggactacaggaacccaccatcacgccctgctatttttttgtatttgtaatagagacagggttttgccatgttggccaggctggtctcaaactcctgacctcagatgatccacccgcctggatctcccaaagtgctgggattacaggcataagccaccatgccaggccagatccttttttgagtcaggcattgatagagcatttgccatgtgtccagtcacagggaggctgggcctcacgtccattttcatttcagacttaaaagaagccacgtactttctcctgcagatccacgtttaagaggctttttctgcataaaaccaaggataaaaaatacagcctggagggcgcagaggagctggagaatgcagtgtccgggcacgtggtgctggaagccaccaccatgaagaagggcctggaaggttggtagcctgcagcctcagggacagacagtagagccaccagtgcccctggggacattcactgtccccaaacggggccttgagttggctgtgggccaagccctaggcacagagccaggggtttctggccctggataaaggcgtgccataggaggtcccctgcatcctccccctgaacccaccctcaccggctgcttcctgtcccccctcagccccctccggacagcagcatcgccacgctgcaggtgagaagcgcaccaaggaaccaggaggcaaagggaagaagaaccgaaatgtcaagattgggaagatcacagtgtcagagaagtggcgggaatcggtgttccgccagatcaccaacgccaatgagctcaagtacctggacgagttcctgctcaacaaggtgggatcactaggcgagggccaggggcatgaggcccggtccccaggggaaccatcacagccaggcattgttttctgaaacacacaacacagggtttagcaggtcaagaatacaaagtccaggctcaggccggggacagtggttcatgtttgtcatcccagcactctgggaggctgagacaggagaatcacttgggcccagcagttcaaaaccagcctgggcaacagagagaccccatctctacaaaaggtttaaatattagctggagtggtggtgcacacctgtagtcccagctcctgggggctgaggcaggaagatcgcttgagcccaagaggtcgaggcaccacaagccacgatcgcagcactgcactccagcctgggtgacagagcaagaccctggctcaaaaaaaataataatgcatatttggtctcaaagcaaagattgatgaagcactgtgtgcaacagaagtggaggcgaacaagctgtggctgccctcaggagggttataccccgtgggggtggggggtgggcaatcctgcagcagatagagctacatttgggagctgcacagcgggcacagggggccgatggggacacagaaggatcaggaaaccctgctaggagtagaggcatcttgaaattaccaggccattccaggcatccccatcctaaggtatggctgggtgttgagcccctgtgtggggcagcaggaagggcctgaactgacctgtagctctcatctaggggggattctgtccgccagggaacactggcaatgtctggggacattggggttatcacagcctcaggggagggcgctgttggcatctggtgggtggaggccagggatgctgcttaacctgctgtggtacacagggcaggccccaatgtggagagtagtcctgccctcaatgtcagtggctttaactctgggttgacaagatgagagaccaggcttggccagagggactggattttatcccgagagcctaggggatgacttaagagaggatagaagtgaccccttgggcacctcctcgggtacgcaggtccccaggcctgaggcacgcagggtcagttcctctccccttccagataaatgacctccgttcccagaagacgcccattgagagcttgtttatcgaagccaccgagaagttcaggagcaacatcaaaacgatgtactctgtcccggtatgtggcggcccggccttcagcctttcccataccctgctcagacccgtcattcccatccgccccttgcccaggcctgcagggtgacgcctagcattcctacagaacgggaagatccacgtgggctacaaggatctgatggagaactaccagatcgtcgtcagcaacctggccactgagcgtggccagaaggacaccaacctggtcctcaacctcttccagtcactgctagatgagttcacccgtggctacaccaagaacgacttcgagccagtgaaggtgggcagcccagcatgccacgcccacctgtgacatgccacgcctacccatgcctcgccatccttagccacgcccacccatgcctcaccatgcttatgccacacccacccatgccctgcccataccacagccactgtgccatgacttgatccacttatgccatgcttacctgtgcctcaccatgatcacttatgccacacccacctgacatgccacacccacccatgccatgccacgcctatgacatgcaacatgctatgcctacccatcccttgccatgattacatgccatgcccacctataccatgccgtgcccatttgtgccacacctacctcctggtggggagccctgcaccctccccaacagagcctcacttctgggtctggggtgtctgaatgggggcgttagggacaatgatgccactccaggtgagggagggttcagggtacccacacgcctgagttatggggtgccaggggtgggttggggctcttcccaggggggcccccgccaacctcctccttgtgttcctcacagcagagcaaagctcagaagaagaagcggaagcaggagcgtgctgtgagtaggctgcacatagatgagagtccgagcaggcgaacattggcaggagcatgcacgtgtgtgtcagtgtcaatgtgcgcatgggcccgtctgcacgcgtatgtgtgcgtggacacgtgtgagtgtgtttttcccccggcatatacggagccgtagtcttgaataagtcacccctgagatcccatgggtcgtcatccaccagtggctggggagggctgccttcccctttccctgcccagcgccttcctctggcctcacaggtccaggagcacaacgggcacgtgttcgccagctaccaggttagcatcccgcagtcgtgcgagcagtgcctctcctatatctggctcatggacaaggccctgctctgcagcggtgagtggctcccccaccaggccccaaaaccctccatgtcccccaccacccctcactgctcaagaggtcttcagggccaggcggggtggctcacacctgtaatcccagcactttgggaggccgaggcaggtggataacgaggtcaggagtttgagaccagcctggccaagatggtgaaacctcatcactactaaaaatacaaaaattatctgggcacagtagtgggcacctgtaatcccagctactcgggaggctgaggcaggagaatcacttgaacctgggaggcgaaggttgcagtgagtcgagatcgcgccactgcaccctaacctgggcaacagagcaagactctgtctcaaaaaaaaaaaaaaaaaggtcttcaccccagcccagccaccaggtcagatctttctggaccgttgtcccagccatatcccaccccctcaaaccgtccaccatcaccggaggagcagagcccaattctcagctggccccaaggcccccagtagccagcacccacccacatctgcagcctcctctcctcgtgggccctgcctctctgtctctgtacacgctgctccaccgcctgaaccatcggcccctccttccccaggctcctcacggtccctcccctgtaggccagactcagccccaggggaccctaagagacagggcccaggaatgacccagctgatccatgctcacacagctttgatatggccaagtcagtacccaagcccaggcagcctccagaggcccagcagggtcaagagggcctctcctacatgtgtttttctgccagaaccatttgggccagggtcttttcagcccagaaggcagccccaccaccccacatctgtccaacagtcagttgtcatggtcctgagataaggatgcgggacccaggcccgtcccctcacctgattccatccttgccaggtgccagacactctcttctttagcgtaaccagtgtaccctctgcaaggcgtcagctgggtggcctgggattcagtgtggttggaagaaggaaaagcagcattgtctttgccccgtgacatcttcgtcccaagtccccaaggccacctcctggcaggacctttagacctttagttctgccagtaggtggccttggggacttggggcaaggatgtcacaggtccccacaaacacctgctcatggttccgctagccaggctgggtctgaggccatgaatggccaccttggagctatgaagtttgtccacacagcctcctctctcaggagtcagggcacaggttcctgcagtgtgggtttagaagttggcaggccaggcacagtggctcacacctgtaatcccagcactttgggaggctggggcgggagggtcgcttgaactcaggagttctaaatcaacctgggcaacatggcaagaccccatctatacaaaaaaaaatacagaaattagccaggcacggtggtgcacgcctgtagtgccagctacttgggaggatcacctgggcctgggaggtcaaggctccagtgagctatgatagtgccactgcactctagcctgggtgacagagtgagaccctgtctcaaaaagaaaaagagaaaccaaaaagaaggcaatccaggccaggtgcagtggcttacgcctctaatcccaacactttgggaggccgaggtgggcagatcacctgaggtcggtagttcgagaccagcctgaccagcatggagaaaccctgtcgctactaaaaatacaaaattagccaggcgtggtggcgcacacctgtaatcccagctactcgggaggccgaggcaggagaatcacttgaacccgggaggcggaggttgcagtgagccgagatcacgccattgcgctctagcctgagaacaagagtgagactccatctcaaaaaaaaaaaaaaaagaaggcaattggcggcccccggccagctgggtgggtggctgcaggaatctggggtccccagcaccctctgtgactcccaccctgtggacctcctagtgtgcaagatgacctgccacaagaagtgcgtgcacaagattcagagccactgctcctacacctacgggaggaaggtgagtgtacgaggcctggaactttctacaatgacactccactcacggccaggtgcaccaggaggtggtgcttgatgtgagggccaagcgaagcattgagcagccagtagggggcggctgtggcctctggttctgcagaacacaccattgtccccggttctgtacaaactccttgaggccctcaggcagggcccaggcctgtgtgtgtgtctcagctcccccagccctgctcatccttgctcctgagagagtcctgagccatgcagagggaggccccccaactctgtgcataaggttggggtcctgggtgctgggggtgcagcaagagtcagggtctacttctgtgaggtggctgtgggggctaggttatagctctctccccacgaaggaccacccatgccttgggtggcctacaaaggaagcccctgcccagtggctgccatgctggccttgacttctgcagccccacacccccaacaaccacgcagaaggagacagggagggacagaacagcagaggaagccctgagggccttgtgcgggaccaggaggcagaggcccccagagacagctggagaggaagacagccaggcccagacctgacccccaaccccggcactgcagggcgagccaggcgttgagcctggccacttcggcgtgtgcgtagacagcctgaccagcgacaaggcctcggtgcccatcgtgctggagaagctcctggaacacgtggagatgcacggcctgtacaccgagggcctctaccgcaagtcgggtgctgccaaccgcactcgggagctccggcaggcgctgcagacaggtgggcgctgtgggcaggtgggtgcagtgccaggccccaggcacagccgtcctgccagtgcgccgctcaccagacccaccccacccaccccacagaccccgcagcagtcaagctggagaacttccccatccacgccatcacaggggtgctgaagcagtggctgcgggagctgcccgagcccctcatgaccttcgcacagtacggcgacttcctccgagccgtcggtgagccccatggcggtgcgggtggcagcaggtggccacagccaggatacagcgttcgctgtgaccagcccaggaggcaggaccacccagttcacaaactgagaaactgaggcccaaagcagtcggcccagccaaaccgggtccccagtttggggtggggccaggacacctctgtagccatccattcttgcctgggcaccacagggtggatggcacctgtgcatctcaggtcgtgttggtggggacaacaggcaccttggggacccttgggagctgacgtcctcaaaccccactgcctgcagagctgccggagaagcaggagcagctggctgccatctatgccgtcctggagcaccttccagaagccaaccacaactccctggagagactcatcttccaccttgtcaagcaagtgcctccccacctgccctctgtggggttagggtcgcattgggaacccgcgaggcagcatttcccaggaggacccgagctggcgttctgtggtggtttcgaaccaggatgcagaccactgttgggggttctgggagggggccaggctgctgggccgcccgggtcccttgaggtacctctctgtgctgcggaagcatctcccagtgctgggctgtggcactgctttcccaacagccaccccagggctcagaagttcagtctcggggctccctggtacctccctccctcggccctagccatcctctaactgccagtggctgtgcagggtggccctgctcgaggatgtcaaccgcatgtcacctggggcgctggccattatcttcgcaccctgcctcctgcgctgccctgacaactcggacccgctgaccagcatgaaggacgtcctcaagatcaccacgtgagtgcccaccctgccccggaggcatgctcagggcagccccacccaggaccccacgacagctccatccatccctgtgtaaataaatgtgtaagaaaagtccagagccgagtgcagcggttcacacctgtaatcctagctactttgggaggccaaggcaagaggatcacttgaggccaggagttcgagaccagcctgggcaacatagcaagaccctacaaaaaatttgaaattggaaatttgtatttaaatataaaaatttaaatttccaaatttaaatttttaaattcaaatttttatttaaatataaaaatttaaatttttgtctctacaaaaaatttaaaaattaggccaggcgtggtggctcacacctgtaatcccagcactttgggagggcgaggtgggtggatcacttgaagccaggagtttgagaccagcctgaccaacatggtgagaccccatctctattaaaaatacaaaaattaggctggacgaggtggctcacgcctgtaatccagcactttgggagaccgagacgggcagatgacctgcggtcgggagttcgagacgagcctgaccaacatggagaaatcctgtctctactaaaaatgcaaaattagccgggcgtggtggcgcatgcctgtaatcccagctacttgggaggctgaggcaggagaatcacttgaatccaggaggcggaggttgcagtgagctgagatcatgccattgcactccagcctgggcaacaaaagcgaaactctatctcaaaaaaaaaaaacaaaatacaaaaattagccaggcctggtggcatgtgcctataatgccagctactgggaggtggaggctacattgagctgagatcgcaccactgcactccagctgggcaacagagtgagactccgtctcaaaaagaaaatttaaaaaaataaaaaatatatatataaactagccaggtgtggtggcaggcgcctgtaatcccagctactcgggaggctgaggcaggataattgcttgaacccaggaggtggaggttgcagtgagctgagatcacgccactgcactccagcctgggcgacagagcgagactccgtctcaaaaaaaaaaaaaaaatccagatggcagtggccccagcagttgtgtctttttgaatgtgctttaatgagcacaccccattgtactaaaacagaacttttttttttctttttgagacggagtctcactctgtctcccaggctggagtgcagtggcacgatctcggctcactgcaagctccgcctcccgggttcacgccattctcctgactcagcctcccaagtagctgggactacaggcgtccaccaccacgcccggctaattttttgtatttttagtagagacgaggtttcactatgttagccaggatgttctcgatctcctgaccttgtgatccgccgtgagccaccgcttccagcctaaaacagaacttttaacaaaggctggatgataggtgaatggtagtggattcctctctctgctacaaagcgtcctgtcacgggaggataaggaacaagcagcagcccctgcaggtcgcaccacagagctcacccaacctgagtccctctggtactgaccactccagactgagtccctctggtactgaccactccggactgagtccctctggtactggccactccgggctgagtccctctggtactgaccactcagggctgagtccctctggcactgaacactccgggctgagtccctctggtactgaccactccaagctgagtccctctggttctgaccactccaagctgagtccctctggttctgaccactccaagctgggtccctctgatactgaccactccaggctgagttcctcccaataatgaccactccaagctgagtccctctgacactgaccactccgagctgagaccctctgatactgacaacaccaggctggccttgaccaccaagtgggcatactgtgggtcagcccatgtctggagcccctggggccatctgcctattgcccctgggacaaactgcccagcagcttgtacttctctgcgaggcaggataattcccaccctactggtgactaaggggttcagttcactctgaccctccttcaaacaaggaggcgtgcagagacaggagacaggctcaaagaggtagagtgagctgccgaaggtcacactgcatgggagctggcacagccgtgtcccaggcactgcttggtctctgagcctcaaccactgccccccaggcaccagctagcatctccctggacctcagacgtccccggggcggtaactgagtcacttcctcccgtgggccttctctgtaggtgcgtggagatgctgatcaaggagcagatgaggaaatacaaagtgaagatggaggagatcagccaactggaggctgcagagagtatcgccttccgcaggctttcgctcctgcgacaaaatgctgtgagtaccggtgatcgtgggggcgggacctctttggtggggcggagcctggtgctgggcagggccttgggcgtggctttgttgctgggaaggctggtgagtggggtcttggtgggcggggccttgggtgggcaggacctcccatgccgaggatgggaccgggtagtgggtgtggtctcgggtagcagggcggggcctcccttcccagttccccgcccactcctaccacacccttggccacaaccagcctggctggggccaccaggccctgcaggtaggggcagacttactgccttgaacgaaagacgatggtcctcgctcagcctcactccaattatgttcctctaggtggggcaggtagggggaccagcttcctgcttgctggtggttcaggtcatgcgtccagccttgtcccttctgacctgggccctacccacggggaaatgttcccatagcagaagaatcagccccacagtgcaggggtgtgttagtggggaacgggctctgggctcctgtgggaaccagggaccccctatcttggtaccggtcattggatgtatccccagctcatgcctgtgtctgtcttggcccgtgtggtcaccctgtgttcatctctctcccagccatggcctctcaaactggggttttcgtctccctatgagggggtcctggtatgtacgcgttcggtgggcccgcggtgcatgtctcccggtgcagtgcatgctggggttccctggggccctgggcccctcgtaggatagacagagcctgtcctaaccttccggaagtgcatgctggggaggccccttgcctgctgaccttctgtgctcaggacgactaatcggccacatgaccaccactctgtcccatgggattcctagagaagtctcactaagagcccagcacactcacatcacaactaacctcctgggatctgctcacacctccggcagtaacctcgcccactcagagatgtcagtgggaccccttgcttctttgtttcagaacaagagccccaagacccgggacatccaggaggaggagctggaggtgctgctggaggaggaggcagccggcggcgatgaggaccgggaaaaggagattctcattgaacggatccagtccatcaaggaggagaagcaagtggctcagtcccctccctcagtccttcatgtttagggcaagctggagtgcaggttccatccctggtggtccgcttgacctcgccaggtttggtcctgtcatccctaacactgggcaaacaacactttttttttttttttttttttttttgagacggcgtctcgctctgtcgcccagctggagtgcagtggtgctatctcggctcactgcaacctccatctcccgggttcaagcgattctctgcctcagcctccgagtagctgggattacaggtgcccaccaccatgccctgctaattttgtgtttttaatagagacagggtttcaccacattggccaggctggtcttgaactcctgacctcaagtgatccacccaccttggcctcccaaagtgttgggattacaggcgtgagccaccgcactcggcctttatttctgagacagggtctttctctgtcacccaggctggattgcagtggtgcgatcacggttcactgcagccacaatcccctaggctcacggggtcctcccacctcagcctccccagtagccggaaccacaggtggtgcacaccaccacgcctggctaattttttttactttttgcagaacagggtccgcctatgttgcccaggctgggttcaaactcctgggctcaagcaatcctcctgcttggggtggggggaggttggggacacagagttacatctaggagcaggacagcctgctctgttccacactggcccagcacttccggtggggtggccttggacaccactaccctttttcctccagggaggacatcacctaccggctgccggagctggacccaaggggctcggacgaggagaacctggactcggagacgtcggccagcaccgagagcctgctggaggagcgggccgggcggggggcctcggaaggtcagtattaaggtagcgtctgcttttctccttcccgtccatcccagcaggccccagggcgagggtcctccggctgccggccctgaagctgcagtaaccctgccatctgtctctcaaaagggccccctgcgcctgctctcccttgccccggcgcgcccaccccgagccccctccccaccgtggccgcccctccacgacgaaggccgtcgtccttcgtaacggtcagagtgaagaccccccggcggacccccatcatgcccacggccaacatcaagctcccaccaggcctgccctcccacctgcctcgctgggcaccgggtgcccgggaggcggctgccccagtgcggcgccgggagccacctgcccgccgcccggaccagatacattccgtgtacatcacgcccggggcagacctgccagtgcagggcgccctggagcccctagaagaggatggccagccacctggggccaagcggaggtactcggatcccccaacgtactgcctgccccccgcctcgggccagaccaatggctgagagccacagctgacaaagtctgcatgtccgaggacggcccctgcactggagctgggcgccagagctgcagagctagtgttcggccctcagagaaggatccagaatcaaaagctcaagagtgacgtgaggtgggcaccggccccaagtgcagagtcaaggcagggagaggccggctggagccaggccccctcgcacgcagcccccaaatcatggacgcacctgtggggagcaccacatctccacctgcggcctcacatctccccactcccctttttgtacgtttaactgtttctttgtacgtggtttacgtaactttaaactgtaacagccttaatggaagaccaaatggttttttatatgtgtatgtacaaagttttctattaacgctgcccgtctcccttataacctggacgtgagctgtcagagcagaagccactaggccactgcgcgtctgaggctcagaccctgctgtggttggcttggggtggccaatgggctgggaccctccatgagagttttggacacttgggtcacctgacccgtgcctctctgacacatgtctccggggggcagccacctggccaatgtgcatttttgcacatgctggaaccttccatgggggtctgggctattggctggagccaggacatgagtcaggggcaccatggacctcacgtgccagggagacttgaatgtggctgtcactcttccggacgccaagggctgcaggaggctgcttttggcactacccaccccgtgtgacagaataggagccagcgactcaggactgctcacgggtcaggagggcaacgcctgaagtcagacctccctataggtcaacagggacaacctggggatctctggagcagggccctcctctctcaggcttggcccactcccccagacacctggacacgtggccacaaatctgggacaaggggcccccgcacagcatgaaataaaaagtgcctgagaagtgtgtgcatgggacgcctgctcatatgggatcgggcttggaagaacagggccggtgggtgggggtctgccctgtggcctcagccaagaagggtgcagaatatgggtggaacactgtcctcaaagttctgtcttgatcctccaccaaacagggagctcccagcagagcctcacttggccaggagcgcctgctgtcctggcagccctctctggcctccctgattcagtgcccagcctctggagcctaaatgtcagctgcagcagccacccatccagcagaggtggccagttcctggtgggcccagcaggacaggaacagatgggctcccaggctgccatcggatgggagtcgtgggaactggctggctggtattggttggggcaccgtgaagaacccaagttcagacagcacatgccagaggttgaggggcttctccaaggccacacagttgggaggggcatggctgggatttagactctgccctgccagcctctagaggcccctttgatgggccctgggtttggtctccattgtttgttgtgggtttttttcttgaaacacggtctcgctctgtcacccaggctggagtgcagtggcgcgatctcggcccactgcagcctccacctctcgggttcaagcgattctcctgcctcagcctcccgagtagctgggattacaggcacgcacaaccaagcccagctaatttttgtgttttttgatagagacagggtttcaccatgttggccaggctgctctccaaactcctgacctccagtgatccatccacctcaccctcccaaagtgctgggattacaggcgtgagccaccgcacctggccctccatggtattttctttttttttttttttttttgagacggagtcttgctttgttgcccaagctggagtgcagtggcacaatctcggctcactgcaacatccacctcctgggttcaagcgattctcctgcctcagtctcccaagtagctgggattacaggcacccaccatcacgcccggctaatttttgtatttttagtagagacggggtttcaccatgttggccaggctggtctcaaactcctgacctcaggtgatccatctgcctcagcctccctaagtgctgggattacaggtgtgagccaccgcacctacccgtctatgatatttttcaaggacatcaggcccactggtgtaaccaaggtgcagatgacctaaggtgtgggaaaacatgaaggctgcatgccaggccctggttcctgtgaagcccccaccctcatcctgtcactccagaagagaggcactgcaaggcataggggtactcagcttccaggtactgaggtgggctgggaaggggttctccatgggggtctgggcgttaggggggacccagccccaccttgctcactctcaggcagagctgtctcatgtgccccttgaggcaggtactgtcacactgtccatttcccgggggaagaagcggatccagaaaagttaaactctcccagggccgaggatggaatcagagctggagctgtgacctggaaacccataaccacaatacagatgagccctgctgaggtgggggaagccttggattcctgaatcccaggctacagaaatcgggaagggtgtgtggacgtgaaatagctccgactgggaagaatccaggtaggagtggggtgcggggaggtactttgagcaggcaaaacagaacaaaagggcacactgcacgcgggtctgacaccagaagaccccggtcgtcctatcattcccgaagggttaacatgctctcgaggaaaagcaagtgattcgcctaagtaagaatggggtggcgcctctcctatttttttaaaatagagatagagtagcgctatcttgcccgggctggcctcaagcaatcctttcccacctctgcctcctaaaatgctggcattacagccctgagccaccgcgcccggcccagcgccccgtctcaaaacaagatattacttccgctccaaacaaagatgggccagctaacgagcgcgggggaaacatccgcccggaaggccacttgaaggcacttccgccctctcttaacatggagccggcggaaggggtggtgtagggccgggcgataatggcggcgtcgaggctggagctaaacctggtgcggctgctatcccgctgcgaggcgatggcagcggagaaacgggacccggacgagtggcgcctggagaaggtgaggggatctcgcactgccgcgtagagcccgactcccggggggtgattcctagggttggaagccacctggcccgactccccggccccagtagcctctcgggcagcgccctttccggtcagtcccgccacgtccacctgtagcttccgcccccgtccctgggactccgcccctcccccactggccccgcctcctttacgcttgacccctcccatttgtcggccccgcccccccgactcccatgatcaggacatgggaaagacccccgggtgacaatccacttttcctccccagtacgtgggagccctagaggacatgttgcaggccctgaaggtccacgcgaggtgagtgcaggcagcctcagggctttcacatcagcacgtggctgtgctactggacatcccagtaccgctatcccagctgggacccttccctgagctggggaccatggacaggttttgtttttcttcttcctgccttccagcaaaccggcctctgaggtgatcaatgaatattcctggaaggtggattttctgaaggggatgctgcaagccgagaagctggtgagaaggggtgcccctgccccctcagcccccatcaccgctcactttggtccccaggacctgcccctccagtgacttatcttcccacatttctgcagacctcctcctcagagaaagcactggccaaccagttcctggcccctggccgtgtgccaaccacagccagagagcgagtgcccgccacaaagacggtgcatctgcagtcacgggcgcggtacaccagcgagatgcggagtgagctactaggcacggtagggctccttccctggtccctgggaatcccttggacaggaataggggttctatgcttgtaggcagccagaaccacaatactgtcagatacaggaaccctaagggggtccagcaatctcttccctgggtcatcacacaaggctgcccaacagaggggcattgtggctaaggctttgctagatgaataggaatttggtacaaggcaaaaatggaatgtgtctggttaagccccagagttggcccaagagcagggtttgagtcctggcttgcaacttacaagacacataagtttcttcagccgtaaaagaggatgacaagttcctttctgagcactttatgtggatcagctcaatcttttaaaatatgagttgttgtggccaggtgcggcagctcacgcctgtaatcccagcactttgggaggccgaggcgggcggatcatttgaggtcaggagttaagaccagcctgaccaacatggagaaaccccgtctttagtaaaaatacaaaattagctgggcatggtggctcacgcctgtaatcccagctactcgggaggctgaggcaggagaatcgcttgaacccaggaggcagaggttgcggtgagctgagatcaagccattgcactccagcctgggcaataagagtgaaactccgtctcaaaaaaaaaaaatatgagttgtcgttaccagtttaaggttgaggaaacaggctcagaggtcatgggatttccccatgtcctgactgaaggtgaggaggttgaggtcagaagggacaggtttgggaacaagacaaggggggtgacttcatggcatttacttttttttttttttttgcgatggagattcgctcttgttgcccaggctagagtgtggtggcgcgatctcggctcactgcaacctccgcctcccaggttcaagcaatactcctgcctcagcctcccaagtcactaggatcacaggcacccccaccacacctggctaactttttgtatttttagtagagatggaatttcattatgttggccaggctggtctcgaacttctgacctcaggtgatctgcccaccttggcctcccaaagtgctgggagtgagccactgcacccagcctcatgccacttacttctttccacaggactctgcaggtgagtcaccatgaacacaacaggacttgagggccagctgactaggacaagacatgtatccttgctgccccggggcctccatgccgagactccatgccctgactccaacaggagcatcaccaaactacacctggaggaagagccaggacagaggaaatggccccgagaggaaacaaagctaggcacagtggctcacacctgtaatttcggaggctgaggcaggtggatcacctgaggtcaggagtttgagaccaacctggccaacatgacaaaaccatgtctctactaaaaatacaaaacttagccggatgcagtgccacgtgtctgtagtcccagctactcgggaggctgaggcaggagaattgcttgaacccaggaggtggaggttgcaatgagctgagatcacaccactgcactccagccggggcgacagagcaagactccgtctcaaaaaaaaaaaaagcaaaaaaattagccaggcgtggtgacgcacacctgtagtcccagcatacttgggaggctgaggcaggaggattgcttgagcctgggaggtagaggttgcagtgagctgagattgcgccagtgcactccagcctagttgacagagagagactctgtctcaaaaataagcaaataaataaattttttaaagctaggcactcccagcctatgggaccaaggctaggctggagggagggacctggggtctgagggaaccgagacaggagtaaggagaccctcctagaagagggggtattcaagcatggtcagaagccaacggggcagcagacaagatgaggaaacagcattccaagcagtagacccagcacaggcaatgctcaggatgccggaaacgggaaaccaacactcgccttttttgcttggcctgttttgctttcagagcctgagatggacgtaaggaagagaacgtgagtgtctgcggccctggggcagtagtggcaattgggcggtgcggcagggacggggtagcagtggccaaaccctggaccaccgaggcactaccacaaggatctaaaccaaccagaagccacttctgtggatgctcttcccagaagtcaaaggccaggcgcagtggctcacgcctgtaatcccaatactttgggaggctgaggcaggcagatcacctgaggccaggagttcaagaccagtctggccaacatggcaaaaccctgtctctactaaaaatacaaaaaattagccgggcatggtggcatgcgcctgtagtcccagctactcaggaggctgaggcaggagaactgcttgaacctgggaggtggaggttacagtgagccgagatcacgccattgcactccagcctgggtgacagagcgagatgctgtctcaaaaaaaaaaaaaaaaaaaaggtcgggcgcggtggctcacgcctgtaatcccagcactttgggaggccgaggcaggtggatcacgaggtcaggggttcgagaccaccctgaccaacatggtgaaaccctgtctctactaaaaatacaaaaattagctgtgcatggtggcaggtgcctgtaatcccagctactcaggagactgaggcaggagaattgcttgaacctgggaggcagaggttgcagtgagccgagatcatgccactgcactccagcctgggcaacagaacgagactctgtatcaaaaaaaaaaaaaaagaaaatgtgttggtcttctcccctttcccactccatctctcatgtcctcctccccccgtgtgtgaaatcagtggagtggcagggtcccagccagtgagtgagaagcagttggcagctgagctagacctcgtcctgcagcgacatcagaacctccaggaaaagctggcggaagagatgctaggactggcccggagcctcaagaccaataccctggccgcccagagtgtcatcaagaaggacaaccaggtgtggggactgggggagctctccagcctctgccctggggcatcagagaaggcttcccagcacaggagcattgtggctggggctttgcgggatgaataggagtttcgtagaaggcaaaaatggcattcccagcagagggcacagcaccagcaagcgacaagaggtgcaggccagtcccagggaagtagagagaggccattcttggccccagtcctgttgacaccttttccacctcccccacagaccctgtcacactcactgaaaatggcggaccagaacctggagaaactgaagacggagtcagagcgtctggagcagcacacgcagaagtcagtcaactggctgctctgggccatgctcattatcgtctgcttcatcttcattagcatgatcctcttcattcgaatcatgcctaaactcaaataaagacccccgcccaccttgtctgtcttccgtctgtcccctgcccccatctagcagtgcctttcaggctggccaatgagatgggagggtttttggaggtccctgaagagccacagacagacagtgcatgagcaggggaagaaccacctcagggccagatgcgggggctcacgcctggaatcccagcactttgggagtccaaggcaggtggatcacttgaggccaggagttcaagaccagcctggccaacatggtgaaaccccgtctctaccaaaaaatacaaaaatcaggcaggcatggtggcgcacgcctgtagtcccagctacttgggaggcttaggcacgagaatcacttgaacccaggaggtggaggttgcagtgagctgagatcccagtactgcactccaacctgagcaacagagcgagactccattgcaaaaaaaaaaaaaaaaagattctaaaaagaaaaagtcagtcttggcaggtggtgactcatcaaacgctgcctccgcccatgttcctctggagcctaccccacaatggacgaggcccagccccaggaggccctaggagcctccgactggcagacttgtagccgaacacagtgccttcagcgatgtaaggccagggtgaggccaaagggcagaacaggggcttggagggtcggggaggagtggggccatgacaggagctcagcctggaggagggcgcatcaacacgaggtcttccctggaattaaaggcaatagttcaaggacacagctcagccacactgcagcctcagctctcgggacactacagatccctcacagtcactcgacaaacacacatgggtcgtgcccagtgctcactggagactctgccctccccaggtcacagtctgatcacttcaaaggagaactgggtgagtactagggtaggggtcctgaaaagggtcgtggagtaggaattctggggtcctgagccctgctctcacaccagctccagacagggcacagcctgtgagagcaactgagggggctcagtgacgagggcttggggtgtctgccccatggcagcattgacggcattgtggggacacttggaggtgcccagtggacccccactgacgtgggtgtaaaatccttaggtagggttgtgtggttttttttgttttgttttgtttttgagacagggtctcgctctgtggcccaggctacggtgcagtagtgcaatcatagctcactgcagcctcgacctccaggcctcaagcaatcctcctgccttggcctcacaaagtgctgggattacaggcatgagccactgtgctcagcccaagtagagatttttaaaagtgctactggcagcttttaaaaagtagaacatagagccaggcgtggtggctcatgcctgtaatcccagcactttgggaggctgaggcgggcggatcacctgaggtcaggagttcgagaccagcctggccaacatggtgaaaacccatgtctactaaaagtacaaaaaattagctgggcatggtggtgggcacctgtaataccagctacttgggaggctgaggcaggagaattgcttgaacccaggaggcggaggttgcagtgagccgagatcacgccactgcactacagcctgggcgacaagagcgagactccatctcaaaaaaaaaaaaaaaaaaaaaaaaaagatcataagaaggagacagccaggcatggtgactcacgcctgtaatcctagctactggggagtctgaggcaggaggaccccttgagcccagggactggaggctacggtgagcagtgatcatgctactgcactccagcctgggtgacagagtaagacccctactcaaaaaaaaaaaaaaaaaaaaaaggaagtttatgcctgagacacagggatgattccttattagaaagccacgttggccagggcaccgtggctcacaccttgtaatgccagcactgtgggaggctgaggtgggaggaccacttgagctcaggagtttaaggccagtctgggcaacatggtaaaaccctgtctctacaaaaaatactaccagctacttgggaggctgagacaggagaatggcttgagcccaggagttcgaggatgcagtgagctgtgatcacaccactacactcctgcctgggtgacagagccagaccctgtctcaaacaacaacaaaagccagctacattaatgcctcagaaaacaaaatcacagatgctgaaatgacaaattgtactgtttagcctccgttacccaaagtctcctaatttaaaaagaaaggaaatagatggacatgttcctcacttcactgaaaaatctcaagccaaagggagcattgactttaatgggcaaatactcaaaacttctgccatcaaaatgaggaataggccaggtgcggtggctaaagccacctgtaaccccagcactttgggaggccaagataggcagatcacttgagctcaggagttcgacaccggcctgaccaatatggtgaaacctggtctctacaaaaatacaaaaattagccaggcatggtggcacgcacctgtaatcccagctactcagaaggctgaggcaggagaatcacttgaactcaggaggcagaagttgcagtgagccaagatcgcaccactacactccaccctgggtaacagaatgagactccatctgaaaaaacaaaaacaaaaaaacggggggaatggaatggggaaggatgcttacagtcgccctgcctccataatgtaacatagtcttgaggtggtagtcagcacaactagacgaaaaaaagaggctgggtgcggtggctcacgcctgtaatcccagcactttgggaggccgaggcgggtggatctagaggtcaggaggtcgagaccatcctggctaacacggtgaaaccccgtctctactaaaaatacaaaaaaaaaattagccgggcatggtagcgggcacctgtagtcccagctactcgggaggctgaggcaggagaacggcgtgaacccaggaggcagagcttgcagtgagccaagatagcgccactgcagtccagcctgggcaaaagagcgagacttcgtctcaaaaaaaaaaaaaaagaaaaaaaaagaaaaaaagaaatggggccaaatatggtggtgcacgcctgtggtcccagatacttcaaaggctgaggcaggaggattgcttgaggccagaagatagagactagcctgggcaacaatagcaagaccctgtcaatagaataaataaaatgccaggcatggtggctcatgtctttagtctcaactacttgggaggctgaagcaggaggactgcttgagcctaggagtttaagacctgactgggcaacatagcgagaccccatctctaccaataaaaatttaaaaattatccaggtgtaggccacctggttggctcaccaggccacactggccaagatggtagaaccctgtctctactaaaaatacaaaaattagccaggcatggtggcgggcacctgtaatcccagctactcaagaggctgagccaggagaattgcttggcccaggaggcggaggtagcagtgaaccgagatcacaccactgcactccagcctgggagacagagcaagactccgtctaaaaaaaaaaaattatccaggtgtggtggtgcgtgcctatagtaccaattattcaggaggctgaggcaaatgatcacttgagcccaggagcccaagtgatcatgctgcactgagctatgatcgtgccactgcactccagactgtgcaacacggtgagaccccatctctaaaacaaacaacaagaaaaaaagaaatgagattgaaaaataagagaagaaaaataagaaatgagaaggcaaaattatttgcagatgatatgaccgtatatatgataggcccaagcgatgtgactaaaaatatttcaataaaagaattccttaagctagcaagagacttatagatatttaaaaattcatttcttgtatactatatatgtatatagctttaaaatgtattaaagcatcccatttatagcagcaataaaaaaagatacactgcctgcttaaacgaattttgttgacatttgaagaactttttttggagtcgcccaggctggagtggtacagcagcacaatcgtggctcactgcaacctccgcctcccggtttcaagtgatctcctgcctcagcctcctgagtagctgggattacaggtgtgtgctaccatgcctggctaatttttgtatttttagtagagacggggtttcaccatgctggccaggctggtcttgaactcctgacctcaagtggtccacccacctcggcctcccagagtgctgggattacaggcataagccaccttgcccggctgacatttgaagaacttctaaaaatcaacaagaaaaaacatttgcaggatataacaggaaaagaattacgaaatagagaaatagtctctaaattttttcactcatacactaggcaatatttccttttttttgagacagtctctcaactgtcatccaggctggagtgcactggcgcaatcttggctcactgcaacctctgcctcccgggttcaagcgattctcctgcctcagcctcccaagtagctgggattacaggcgcccgccgtcacacctggctaattttttatatttttagtagagacggggtttcactatgttggccaggctggtctcgaactcctgaccttgtgatccgcccgcctcggcctctcaaagtgttaggattacaggcgtgagccaccgcgcctagccttagtaggcaatattttcaactttgaaagtacaggtgaggggccagcgctgtggctcacgcctgtaatcccagcacgctgggaggccgaggcaggcggatcacgaggtcaggagatcgagaccatcctggctaacacggtgaaacctcgtctctactaaaaaatagaaaaaattagccgggcgtggtggtgggcgcctgtagtcccagctactcaggaggctgaggcaggagaatggtttgaaccctggaggcggagcttgcagtgagccgagatcgcgccactgtactccagcctaggagacagagcgagactccgtctcaaaaaaaaaaaaaaaagaaaagaaagtacaggtgagggaatccgttatcatgccagtgccgccaaggttgtgggaaaacccctgtatctcttggagcataaatggtacaatctcactaaggagtaacttggcagtatgttccaaatgtaaaatacacacatcccagacaggaggctgaggcaggaggatcgcttgagtccaggagttggaaaacagcctggacccataaggacatttcctctcaaaaaaaaaaaaaaaaaaaaaaaaaaaaaatgccaagcacgattatgggatcacacctgtaatcccagcactgtgggaggctgaggcgggtggattgctggaactcgggagttcaagaccagcctgagcaacgcggcgagatcccgtctctacaaaaaacacaaaaattagggaggcgttgtgtcacctgtggttccagctatttgggaggctgaggtggaaggatcaattgaggctaggaaggaggtcgaggccacagtgagccatgatcatgccctccagcctgggcaacacagcctctctctctctctctctctatatatatatatataaaaggccgatttggggcacactgtctataagttagctctgctctgccaggaacagtactgttcagtaaagatgccatctaacaccacctgctcgcccttaaaagaaataaaagaaaaagaaagaaaggggcgggtgcggtggctcacgcctgtaacccagcactttgggaggccgaggcaagcggattgcttgagtcccggaagctgttcaagaccagcctggctaaaatgacgaaactccgggcgggcgcggtggctcacacctgtaatcccagcactttgggaggccgaggcggacggatcacttgacgtcagaagtttgagaccagcctggccaatgtggcgaaaccccgtctctactaaaaatacaaacaacaacaacagcaaaaaattagctgggcgtggaagtgtgcgcatgtagtcccagctactcgggagccggaggcaggagaaccgcttgaacccgggaggcggaggctgcagtgagccgagatcacgccactgcattccagcctgggcaagtgagactcttgttaaaaaatttttttcatataattgctgaaaaaaataaataagtttaaatttgcaaaaccatcccgttttttcagacaaacttgagggtcgaggtcggagtcgaccatgtttcgaaggtgtgtggccacgcccagccaggtcagccccgcccccaggccgtcaggcccagccccctttcgtcagaccccgcccccagccctgctgagcgaccccgccagtcgggtccatcctgcagtaaatgcacaacccggacggaagtgcctctccgacagcagatccaggctcggagctccagacgctgggacaggtgacccggggcggtagcgagccggacggccttgcaggtggggcggaggtcccgaggagctcctcgggcgcggtcgtctgtgggctctgcgcgccctggaggtcgaggctccggcagcgcgggggttaactcgagccggtcccaggctgcgcggcgacgtcagagttcatttacatagcgcttatttgggttgcgcagtcgtgggcggggtctggacgtcgctgcggaccaatcgcgtgcgtctatgcaaatagcggtcgttctggggaactctgctcccgcggggtgagagttggccgctcttcggccgagctgcccgcgcgtcctttctccgtgcgcgtcgtcaggcgtgtcctctccgcgtgtccacccacaggccgcccgcagaccacccccgccgcgcgcgggacacgacgccccccgcaggacccgcccatcagcccggaaacccctgagctgcttctcccggaggccgatgcccacccgggagcccccaaagactcgcggctcccgggggcacctgcatactcacccgcctgggcctgggcccccggtgagcctgaccgggagggggtccccaggccgggcctctaggcaaaagatttagcccctccagtttgagggactccggtttcccgacaccccgatttaactccagaccacgattcctgtggcagctgcagggactggcgccccgaggcctcaaaaccagcgccccccgccctccgtgccagccccagccgggaccccacaaggcaaagaccaagaagattgtgtttgaggatgagttgctctcccaggccctcctgggcgccaagaagcctattggagccatccctaaggggcataagcctaggccccacccagtgcccgactatgagctgtgagtgtcccccatgtgattcttcatgcctgggatcaggagaggggcactgaggctggggctttgatagttgaataagagtttaccaaagagtagaaaggaaaggatcccttgctgatcagtagtgggattgtccctgtgaataagccactgcactccagcctgggcaacacagtgagatcccgtctccgaaaataaataaataaataggcgaggcgcggtggctcatgcctgtaatcccagcactttgggaggctgaggcaggcggatcacctgaggtcaggagttcgagaccagcccggccaacattgtgaaaccccgtctctactaaaaacacaaaaattagctggatatagtggcgcatgcctgtaatcccagctactgaagaggctgaggtgggagaattgcttgaacccgggaggtggaggttgcagtgagctgagatcgctacactgcactccagcctggacaacagagcaagactctatctcaaaaaataataataaataaattaaaagagggagagaaaaggaacgtttctagtaggggcccagcatggacaaagaaaagcaaattacactgactgggggaaagagtggggttctttacactcacactctgaccctcttcaacctggtagtaagtacccgccagtgagcagtgagagggaacggagccgctatgtcgcagtgttccaggaccagtacggagagttcttggagctccagcacgaggtggggtgtgcacaggcaaagctcaggcagctggaggccctgctgagctccctgcccccaccccaaagccaggtcagcactagggagaaagccctgccccgcagcccttctgagtggcccgacccaagcctctgggacacccactgggtccagatttccaggactctttctcctctcggttggctgggcgccgtgacacatggctaaggtcagcccttgaagtccccactagatgggcatttagtctgtctgagcctcagtttcttcatcccttcttgaattcaactctccctaaaccccctttctactcctccccttgcagaaggaggcccaagttgcagcccgggtttggagggagtttgagatgaagcgaatggtgagtcttgcatcccacagcttggtcttgcacccctgagacttctgtgaggctggggtgcctgtgcccagtttcttttttttttctttcttttgagacagaatctcgctctgtcacccaggcgggagtgcagtggtatgatctcagctcactgcaacctcagcgtcccgggttcaagcggttctcctgcctcagctgggatcacaggcgcccaccaccgtgcctggcaaatttttgtatttgtagtagagatggggtttcaccatgttggccaggctggtctcgaactcctgacctcaagtgatccgcccacctcggcctcccagactgctgggattacaggcatgagccaccttgcccggctcacccggtcgcctgtgcccagtttcaaggagagaaaattgaggctcggagaatgaaaggcagagagttaagcagcttgaaggccacagggcagactgctgcaaagacttccgggtctcgccctgcctaggatcctggcttcctggacaagcaggctcgctgccactacctgaagggtaaactgaggcatctcaagactcagatccagaaattcgatgaccaaggagacagcgagggctccgtgtacttctaagtgcccctgcagatgggcagagggatgcatggggatgcaggtcccttgcatttcttggtatctctcagcttttcctcttgcagctccccctaccaggggtcgctttctcctggattgcaaatgcctcttcagtttggactcagctctgacagcccctcctccaggaaggccttccaggacttcctcctctgggtcctctagctctgaccctacagggactccagatctcaacctgttccctggaagtagggcctgctctccatcccagtgaaataaacatgtattagacacctactgagtataattacttaacacttctgatttcactcagttgtcacacacacaaaaagttgttttttgtttttgtttttgtttgagactgtgtctcactctgtcgcccaggctggagtgcagtggcacgatcttggctcactgcaacctccgcctccccggttcaagtgattctcctgcctcagcctcccaagtagctgggattacagacacctgccaccatgcccaactaattttcatatttttagtagagacggggtttcaccatgttggccaggctggactggaactcctgacctcaagtgatccgcccacctcagcctccaaaagtgctggggttacaggcatgagccaccacgtccagctggattcttcactctctgtgtctccctgggcacttcaggacagcaactgaccccagtgtgtgggcacggtccatatgcatggcctagggggaggctcttccagtgtctgacccatcccaggccctagctgtgatgggtggggcacaggtggggccagtctccctgtgggagccatgtaacagcagaccagaagctgtcctctgagtttcagtctcccaagggagccacaggggcaagaagcaaccaggaagaccaactacatgcaggggagacagcgtcaaccactgggccaccacgattgtcctcaagaaggccctagtctggggaagatagccctgagtccagtaaaagaaggctgcacagcagagtcttaatagccagggaggctcaagatctcttcccgcaggaagggccatgtgggtagggttttgtaggaaaagtaggagttcagcagtcaggccttggacagacatccagatctctggcctggggccaaacagcaggacagacaccatggtctcactcaaccctcagatgtcctgtgcattggataaatgagaccttgctgtccagtttgactggagtagacatggacccactcactcacaggacaccatggagagaccctgacctaatgcaaaacccagtgcagccttcaacgagaacctggtgtcctctccatcccgcccctgcctcagttcccttctgggaacgtgcccacaagaaaccctcactgactccacaggaggggcctaatctctcgtcttccaaggctttcttcaagatggacatggggagactagggagcattttggcaaactggggctgcttaagagctgagcactggcccagcaggcagcgtgacagacttgacttcttcccttgctgttttcaggagggcatctttcttttttttttttttttcagacagtcttcctctgttgcccagagtggagtgtagtggtgcgatctcagctcactgcaacctccgccttccaggttcaagtgattctcgtgcctgagtctcccgagtagctgggattacaggctcctgccaccacgcctggctacagaaggacatcagtgagaggtgccacccccaccaccattcgggccctttctctctgccctacagctctggtgctgaattccacaggtgcctttcccaccacagagctgtgccacacactcccgaggctgggacgggagagtccctggtaccccacatgattccgtatcaacccagtgaagcccacatttcaaagtcttggccttgtaggtgcctgactcccaaacgtcaatctctgaaacagatttttagttccatgtgagaaaaaaaactgaagtcagattgactcaggcacaaaaggggggagactgagttcacagaacttaaaacacccaagggtttcaggtatggcttgatctggggctccaaaggcatcttgggaaattgatcttccatccttggctctgctttaattagattctcccagttccaaatcccaccgtgcaatctcactggctagtttggcatcccagggcctccataaaccagttgctgtggcccagggaatggtggtctctgattggctcgccttacatcatgtgacaggactggccccagaggtttctcccaaggacattggagcccaaacaagattaagggcccggcagctcatgcctataatcacaccactttgggaggccaaggcaggtggatcacctgtcaggagttcgagaccagcctggccaacatggcaaaacccctctagttaaggtacaaaaatcagctgaacgtggtggtgcgcacctgtaatcccaactactcaggaggctgaggcaggagaattgctccaactcgggaggcagaggttgcactgagccaagattgcaccactgcactccagcccaggtgaaacagcgaaactccatctcaaaaaaaaaaaaaaaaaaaaaaaaaaagattaaggttgaccaaaagaaagtaagtgaggctaggcacagtggctcacgcttgtaatccacttttggaggcctcaggtgcatcacctgaggtcaggagttcgagaccaacctggtcaacatggtgaaaccccatctctaccaaaaataaaattagctgggcatcgtggtgggtgcctgtagttccagctactggggaggctgaggcaggagaatcgcttgaacctgtgaggcagaggttacagtgagccaagatcacgccactgcactccagcctgggtgacgaagtaggactccgtctcaaaaataaaaaataaaaataaagaccagggaggctgtgcaggtaggaaatgtctttattattggccttgagtcatcatgtagtgtctgacataggttacgtgtccagaggatctgcctggcacacgctagctacccctgcccactggagcagcccctctggccgacgccaggcctttgtccatcatgccagggaagccaaccccaccatcccacaagttcatgctaggggtgctgaggaacaaggctgtcctaggattggaccctccatcctggacaggggtcctggggaggatgaggctgaggcctggatgatcagtctctttttggtttcatgatcatttaaaaaacagaaaagacaaacatttcacagtctttaaaaaatagaagtctgaggagagaagccagagtcctgggccccgggaggcccctcgaggcctcagcattccctgtcccttgaggtctgtctgcaggcctggccacagcacacgtggccccgtcatggtcactggcccgagccgtagggccagttgaaggtactccccgacagcagcatgtctctgatcagtgtctcaatgggcgtcttccccaccaggcgcatgaagaacagctgggagatgagggaggcagggaccgcgcgcagggcggggagccgcagcagcaggcgcccgaagcgctggggctgggacgggtactgcgcccgcacatactcggtgagggccacctgcgccttctcctgcaggctctcaacgtgggccgggtctgagaggccacaggcgtctagggggacaaaggcaagtcagacaggtgggaggcagctagagaacacagagcccacaggggtgactaggggacaccactcgccactgtgggtaagaacagggggccgggcatgatggctcacggccacagtcccagcactttgggaggccaaggcagaagcatcatttaaggccaggatttgagaccagccagggcaacatagtatgatcccttctctgcaaaaacaaatcagctggggctgggcacagtagctcacgcctgtaatcccagcactttgggaggctgaggcaggtggatcacttgaggtcaggagttcaagaccagcctggccaacatgatgatattccgtctctactaaaaataagaataattagccaggcatggtagtgcgtgcctgcagttccagctactcggaaggctaatgggaggatcgcttgagcctgggaggcggaggttgcagtgagccgagatcgtgccactgcactccagcctgggcaacagagggagaccctgtctcaaaataaataaaaaataaaaattagtccagtgtgatggcacacgcttgtagtcccagctcctcaagaggctgaggtgggaggatctcttgagcctaggagtttgaggctacagtgatccatgatcatagcacagcctgggcgacagagtaataagaccctgtctcaaacaaaacaaaacaaaacaaaacaaaacaaaacaaaaaacgaccctgggatgcaaatgggactatctaagactgtgtcgatcctccagagatagtgaggtgttctcatctaaccagtgacataggggtgcaggcagtgatgtttcaagggtggctggcacccaactcatgcctttggcagggagacaggttctaatttttttttctttaagatagagtctcacactgtcgcccaggctgaagtgtagtggcacgatctcactgcaacctctgcctccgggttcaagtgattctcctgccgcagcctcacaagtagctggcattacaggcacactccaccacgcctagctaatttttgtatttttagtagagacgggttttgctgtgttggccaggctggtcttgaactcctgacctcaagcaatctccccacctcggcctcccaaagtgctgggattacagggccaccagccaggccaaggagatgggttctaaggaagctcgcagggaaggtggggctgggaagggaatttgatgaggaagacagagcccagaagggcctacggtgtgagagaatgtggcagcctctagagagagacccaagataggaagccaagaagaaatctgggaaggccaggcgcggtggctcacgcctgtaatcccagcactttgggaggctgaggcgggcagatcatgaggtcaggagttcgagatcagcctgaccaacatgatgaaaccccgtctctactaaaaacacaaaaattagccaggcgtggtgacgcgtgcctgtaatcccagctactcaggaggctgaggcaggagaatagcttgaaccagggaggcggaggttgcagtgagccgagatcgtgctactgcactccagcctgggcgacggagtaagactccgtctcaaaaaaaaaaaaaaaaaatcttctgggaaaacaataaataaagccatatttattgatttttgagacgcggtctcactctgttgcgcaggctcaagtgcagtgggaaaatcagagctcactggagcctcgaactcctgggctcaagtggttctcccaactctgcttcctaaagtgcggtgattacaggcctgagccaccttgcaggcccaaaaccatatttatcaaatgaaagccacctcccagagtagcctggatctggttcctagccccaaagatacctctgatgggatctagagacttccagtaggttaaagaactcccaggagacaggctggagagatctttgtctaaaggcatggtggcttatgcctgtaatcctagcactttgggtggctgaggcaggactggttgcgcccagaagctcaagaccagcctaggcaacacggtgagaccacgtctctacagaaaacgtttaaaaaaaaattagccgggaatggtggtgcacgcctgtggtcccagctactcaagaggctgaagtgtgagggaggattgcttgagccctggagatcaaggctgcagtgaaccgtgttcggacaactgcactccagcctgggtgacagggtgagacccagtctcaaaaaatggaaatacaaataaaaaaataaagtggaaaaaaaaaatttggctgtaccgccagtcgctggaatacgatgggctaccactgctagatagctgatggttaagaaagttctggggttgccccgcccctcaacgggaggggcctccgagccacgcccctacccagatccctacaaccctggctacctggaggttgccctgggagcccagtgggggcctgagggggccagaaccagggggtcaggaccttccctcccacgtccccccaaccttgtgctatcagtgctcactaagcctgaagagccctttggtgagggagtaggggtctcagggagcctgggaacaggaagagggttctggggtctgggccctggtcctggcccagccttgggtctggggtccggggttcagagttctccgagagtcctgggatcacggagtgggggtgtcacagtgtcacactgcttacatcacccctctacagccacccaagagcgttcactcacggcgcgtgcagggccccaggcctagggagcgagcggggcgctatgggggccggagtctgggtccaggccgccctcctcctaacctcccttgggtccccccatcccgcggccctcttcggagcgtggctcaccgggcgtgaagagcgcgatggccttgaggcagccatactcggccgagtcgacctgcaggcggcccagcttgtccacctgctcctggaaggcgcgcacctggtccatgaaagccacggcgcgctcggcggccataggcgcggcgtggaggccggcggcggccagtagcggcgccgtgtgcaggggcagcgccgcctgcgccgcgttcagcacgaagagctcgctccagctcaggcgcagcagcgccacctggtcggccaccggcagctcggggaagaagggcgcgtggcgcgcccactccacggtgctgaagagcagccgcgccgccagctcgcacacgttgtcgatgcccagcaccgcgcccgccgcgccgccccctgcgccgaagcgtccggccgccgcagggtagggctcagcgcgcagcagctgcgcgatcagttcggacaccggctgccccgggaagaggtctccgccgctcgccactgccgccagcgccgagcccggggggctgcccgaggaggcggccacggcaccaggcagcgagtgcgggatgcggccgcgctgcaccgctgcgggaggcggggacaggagggacatgggggcgggaggggaggcggggggggggggggcgggcagcaggaaacgggggagggacaggagatgggggaggggagggcggggcacagaaggccgggaggagaggagattggagagacaggaagggaagcgaggggtagagaggagagggccggaagaggggggatgaggggccaagtaggtgcccatagagacatggggtggggggcaggtgggggggggcaggtagggagaataacgggaaagggagacaaaagtcatcaaggggtcactcaggccctcccctccaaagcctccaggcccagcctttcccagaatgcccaaccccaccccatgggcgccaggctggttagaaagtaagagtccaggagtccctgtctaggtccagccaccaccccccacccccagctcctggggacaaggaggagcatctaataaaccttttggagcctcctaacagatagtcatggggttcccagagctgaggatgggccatggaggacttggggaccctggccagcttggtccccaaagcaacagatcaatacccacccagcactggctctctcctatggaacagggatcatttctctaccttccatccccctccccaccagatggtgacccctgagggccggtctgggtccctgcagaggctacagtgcagggaagggttgggggggacctacagtaaggaggggtcccaggggggctgccataggtcctcagtaaacattagccgccatcagtagccttgcttatgaagcggggaggccctgctgctggcttgggcacgtctgcagtgaccaggtgggtgagaaaagggaaactgaggcatgaagaggaagagagttggccatgtgcctgcctggcttgtgccggggtgggcgggatggcagggctgactgggctggttgccagcagactaattaatgagctttaatgagctggcatgccccatctcatcacctccgtgaactccaggtcaactctgtgtagagcaaacaccggaggggaacgcgagcagaagccaggggcgaacagagctaagcggagaagccagggcatgggttgaagcccgctccaaggggtccctgagtctgagtcaactgtcaaatggggataggtggatggggcccaaaagtggttccccggtcctccaggaagcttcctcccgctttgttcactgggttgtgagcaaccaccactccctcacatggccacattcccaccccagggcctttgaactttttctttttcttttttccctccctccctcccttctttcctttcctttcttcctctctctctctctccctctctctctctctctttttgagatagagttctgctctgtcaccaggctggagtgcagtggcacaatctcagctcactgcagcctccgactccggggttcgagtgattctcctgcctcagcctcccgagtagctgggattagaggcacctgccaccacgcctggctaatttttgtatttttagtagagacggggtttcaccatgttggccaggatggtctcaatctcctgacctcgtgatctgcccacctcggcctcccaaagtgctgggattacaggcgtgagcccccacgcctggccggcctttgcactttctgttcactcttcctcaaacccctccccagctcttcagcccagactgtggaggttcaaatcccaatcacaactctgttgctctctgacaaatggcctcaccaatctgctgtgtgcctcagtttcctcatctgtaaaatgcagacagtggctcccatttgcaagcctagcactttgggaggctgaggcaggaagatcgcttgagcccaggagtttgagaccagcctgggcaacatagcgagaccccgtctctacaaaaaattaagaaattagcccagcatggtagcgaacacctgtaatctcagctactcaggaggctgaggtgggagaatcacttcaacccaggagtttaaggctgcagtgagctatgatcgcaccactgcactccagacagagtgagaccccgtctcaaaaacgatgtcaccaatcactgaattaaatgagaatctataccttaaaataatgcctgccacacaggaaaggtaattacatggtaattcaagccaaggaccatttattgaacacctactgtgtaccaagccctggtctaggcgctggggaacaagacagacaaaaatacctgcccacagggaatggacattctgggtgtaagcaaattacagaacaagacaggtggcgtcaaatacagggggatcaggagggcttccctgaggaggtgatgtttgagcaaaccttgaaggcaaggttagggagggagccatgtatggacctggaaaaagtgcactccaggcagagggaagagcccgtgcaaaggacccgaggcaggtgtgcttaaagcatgagctgtcatcataaatatttccacccgaggcttttggagacttctggcgaggctgtttgctctgaggccatgacttgagatatatgaggattttaggtaaaatagacaagtagaggcaaaatccatgttatgggggcagggacaagaaagttacccccaaacttaaaagggccacagggagtgatcagttttaaaagaaagcccctcagctgcctctctcagcttctcccaccaaggcctagaccaaaaaacaacagctttacgccaagtatggtggctcattcctgtaatcccagtagtttgggaggccaaggtgggagggtcgcttcaagctaggagttcgagaccagcctgggcaacatagtgggactctgtctctagaaaataaaaaaagctgccgggtggggtggctcatgcctataatccgagcactttgggaggctgaggcgagcggatcacctggggtcaggagttggagactccagcctggccaacacggtgaaacaccatctctattaaaaatacaaaaattaggccaggcgcggtgactcacgcctgtaatcccaacactttgggaggccgaggcgggcagatcacgagatcaggagatcgagaccatcctggccaacatagtgaaactccatctctattaaaaatacaaaaattagctgggcgtggtggcatgtgcctgtaatcccagctactcaggaggctgaggcaggagaatcgcttgaaccagggagtcagaggttgcagtgagccgagatggcaccacagcactccagcctggcaacagagcgagactctgtctcaaaaacaaaacaaaacaaaatacaaaaattaggtgggcgtgccgggcgcggtggcttacgcctgtaatcccagcactttgggaggctgaggcaggcagatcacgaggtcaggagatcgagaccatcctggctaacatggtgaaaccccgtctctactaaaaatacaaaaatatccgggcgagatggcaggcgcctgtagtcccagctactccggaggctgaggcaggagaatggcgtgaacccagggggcggagcctgcagtgagccgagatcatgccactgcactccagcctgggcgacagagcaagactcagtctcagaaaaaaaaaaaaaattagctgggcgtgttggcccgtatctgtagtcccagctactcgggaggctgaggcaggacaatcacttgaacccgggaggcggaggctgcagtgagctgagatcacaccactgcactccagcctggaagatggagcgagactccatctcaaataaaaataaaaataaataaagaaaataaggaaaaaaaaacttcaaagcaggggaggctcaggttagacattagaaagaactgccagcctggcccacgacacagtccccagaggaacctgaaacccagcacaggagatctcgtccaataggctagattctattcctgaaccccagaaatccatgcagaaatctctgggttctacttgaattctaagggggtttggcagagttctaggcccagcagcccagaatacgcccgtccacctgggtcccctgagcagagacagctgggcctcactcttgctcccagcgcccggggtcagaagaaagggtaagctgccctttgccttaatcgggcagagttcctgccttgggcaaacaaaaagcatgggtgaagggtggaggagaaacaaatcaaataaaaaaaaaaatccttgttcagaacgcggtggccgcgctagcagacaagaggtcaccaaggtgtcagggccagggaactggcctctgaggctggagtcgggggtaattggggaaggcagctcctgcaagagaatggggctggggaaagtcccttgtggggcgtccctggcctcttcagctccacggcagcaaccagggggccacggatcctaattggattcctccagcctagggccagactgcagcccacgggatcaagggatcagtggtaatgaggttagcaggcgccggcccccaccctgtgaggcacccagacccctgtgaaagggaggggtgaaagggaggggaaaaaggggaggaagaagctgtttgttcaccccggctccagcggctgtgatcgtccccagtgtgtccccagcacgtactcaccctccttcctcatgcccacccggaagcacttcttgagacggcagtactggcactggttccggtggtgctggtcgatctggcagtcacggttggacctgggggcacacagaagccagggctccctgagacccccatatcctcctccccgaaccagcctatgagccgcctttggaggctgcccctcagaaatactagtaggggccctctagactggagaggtagccccaaaggggtacaggagctcagcttgcaggtctgcaaaccagacaggataacccggatgagtggtgatggatgaagaggaatctgtggaaaagcagatgaacaccccagggagggcacattggcatgggttttgaaggatgaataggagttctccaggtgaatggcggggtgatcccagagagagggtacagccagagcaaaagggttgaaatacacaaatatggaggcctaaagagtttcattttatttggtcactgtcaggctgagcagggtcattgtccccaaaaagatgtgaaggcaaagaggacatggtcagagagctggactttgtgaattaactaggggtcaggccaggggctagtggtctgtggggtcatagcattgtggggccccagcattatcacccgcacaatgcccaccccaaggaatgaggaagtaaacaaagtcactctggtcctcagccctgaaggccccacacctacgctcttccgagaggaccacccaacccctatgcaagctggagattttcctggtcagccctcagtgaatgccgttgcctcttgcagggatgagacaggtggccccaccctgagaggtggtgagctccccatcctgggtcagcccccaagcaggaaggtccaggccttattcttcaaatgtccccagaaccttctccccttggcccctgcccttggactcccctggtctcttgccaccaggagctgggggctctccaaggcctgggcctggagcaactacccctggggttccagctggacacccaggggacacacagagacagtcacagagtagaaccaccacttaagggaattaaacagatgcatctctgcagtggctcacgcctgtaatcccagcactttgggaggcgggggagggtggatcacctgaggtcagttcaagaccagcctggccaacatggtgaaaccccgtctctactaaaaatacaaaaatgagctgggcgtggtggcgcatgcctgtaatcccagctacttggcaggctgaggaaggagaatcgcttgaactggggaggtggaggttgcagtgagccaagattgacccactgcattccagccagggtgacagagtgagactctgtctcaaaaaaaaagaaaaaaaaaaaggctgggtgcagtggctcatgcctgtaatcccagcactttgggaggccgaggcgggcggatcacctgaggttgggagtttgagaccagcctgaacaacatagagaaaacctgtctctactaaaaatacaaaattagccgggcatggtggcgcatgcctgtaatcccagctatttgggaggctgaggcaggagaaccgcttgaacccgggaggcagaggttgcagtgagttgagatcacgccatcgcactccagcctgggcaacaagagtgaaactccgtctcaaaaacaaaacaaaacaaaacaaaacagatgaatctcagctgcagatacccagccctgcccctcaggtggcgactgccccactgagcctcggtttcctcatctgaaaatgggaggtcagatattgccctatcatatgggatggactgggtcagaggggttcacgggggacagtgccaagacccagagcccagccggagaacccaacttaggaaagctgaggatctgcgcccactcccccgtaccccccctccaccactgcctgggtcctgcagcaccagccactgagcccctgggaagaggccccactagggcagagggagctcaggcagaaccagaacaaagcccagcggctgggtggtgggagggtccagggcagccgggtggaaacggcctggcctggggcggccctgcaggcaggcagaggcccagctcaggggcccctgacctcaggggaggccctgaaccttcagtctcaacttccccagctgtggaattgggacagatccatccctccaaggagggaaacagttaagttcttcctgttatcccacctaaagagtgcaagcttttttgcccaaccccatggcccaactcagcttcctccctgggcttctggcctccagtccaatttgatcagagccctctcctgctcacacaccctctatggctccccattaccctcagccagcatttcaggcccacctagctctgacttctcccatggctgcacagtccccctcttacagcacagctcccccagtctgccactaagtgttttgtctggaccacattctggcatgtccctgtggcctttcttccacctgccaactccatgcttcaaggctcatgtcccctagcctcctccaggcagccctctctgacctccaggcagagcctctgctctctccctgggaccccagatcccacagacttggggcatctgtctcactgtgtctcctccagactgggggcttctcaggagctagacttggagctggggtctctctggaggggctggcatcaaactacccaggctgggccccagcgagaccctgctcaatccatttgaagctcagaatggaatggtgatttcaccaggtcacacaactgacacagcacaaacctgtcagctccaagcaaggccccccccacccaaaattgctgctccctgacaccaccctcaggaagctcctgggaccccaaaactgcctgagcccccctcccttaccctccctaaagatatgaccagagagcaggcggttttccagcagcaagaatgaggccaaagtctagtggcccactttgtgctggaggagggagcaaggcagctctgccacacatggccacaccaggccagccctgacccgggacctggggccaaactccaccctcgggtacctggggccctatttggtggcctcagccaacaagccttccatcagccgttctccctggggccactccgatccgaactcagcggtccccaccctagccccacagttcccccacagtgcccccaactcgggcagcgtccctccatgtccaacgcaaagcaggcaccaggacctctctctgggcctttgggcctctgttttgggcagctgggaactgagaccgtctagacgggctccacagagaccctgcatgttcctggggtgcagagtaggggcttataaacggacagatcggatgctcgcccgggaacggtgagaaaagaactcccgggctggacaaccccgatcgctttccctggggaccttccgccagaacagctagcaaggccacgccctgccagagaggtctccgacctgggacagcccaaggctcctgctcggaaacgtttcactccctgcccgtctcagagacacccaaagtttgagggatttttccaggagccccaggtctgcacccacccctgggggagagggacgtttcagtcaattccggtggccctgccggccttccagtggcgatttccggtgacccaaggcccagagtgagcccagaggggttccctgagatgggcaagcccagctcccacccccacccccaccgctgggcccctcatgcgaagaaggccgccccgtgccaccccagcctccctccgtctgccgcctccgtagccacagcgactttggaagtgatatttgaccccaagggcgcgccgtatcgatccgcgcggccgcagacaatggcccctggacgctgcgagctccacggtccaagttccacgttcgattccctcgagggcatcccgcgcgccgggatccccgagaacgggtgccctggggttgggttaccacccctgacagcacccctacccccaccccagcgcggagatgacccctccccagagaaaaagcggagggaaggagaagcaagtaactggggcaaaagcctccagggaccacctgatggggggggaacctgcaacgatgtagcgccgactgtatacacaatcccagccatggaatgcgggaggagggtgctgtgcccctatctcagagggggcagtggaggcccagggaaggtcagcgccaggcccaaggtgaccgagcaggtcagaggcctgccccaggtcggggcggggtgcacggcggcggcgcgcggatggggggctcaccggcaggtgtagctgaggttgcggcggatgcttcgcttgaaaaagctcttgcagccctcgcaggtgaagacaccgtaatgcttgccgctcgacttgtccccgcacaccacgcagtccacctgcagccccggccgctcctcgtcgcccggctcggcgtcgctggcggcaccggggggcgaggccgagtcgtcctcggccgcgcgcgggtagccgcccgccttgtccacgccgttcgtgtcgccgccggggccgccccagccgccggtcaccatggccatagccccagggcagcggggccggggcgcccccaccgcgctcttccctccgggcacccctctcggcccgggggaccctacgcggcgcgcattcggccccggcgcgcggggggcacgggctgcaccccccaaaaaagttttgcagcaacttcctgcggccggtcctcgcgcccgggcggaactggtcgggccggttccaggccaactttcccacgcgtgcgcggggccgggcccggggccgggaggggcacgctagaggcgcgggccgggggcccagaggactcgcgtcccgccgccctggggccccggcgggggcgcgcgggccatggcccggcccgagccgcgcagggggcgtcctctggcctggccgccgctcgcccgggggctgcggccaactcagcgggccgccatccgagcgcgggaggccggggggaaagtttggccgcaagttgcgcggccgcccgtggcggggggggaggggcggcgggtgcgcgccggggctgatcgccgcgccccctgggtcccccggcgcccgcggctgccgctccgggcctgcagggccgctgggccggcgcctctggagctgccgcccccgctgcggccgctcctgcctggcctgggcctgcgcctgggcccaagcctcgctctcgccgccgccaccgccaccgaccccgcgcgccggcctcgcgctgcggccggtttgacacacagcgttccattcgcggggcgggcggggggcgggggcgggggcaggggcgcgcgccgcgggctgggggcgggcgctcgttgccccggcgacggccgcccttataagggcatgggtggccgcgcgcggcgccgggcgaacgggccggcgggagggacgggggccgagcgctgggccgcggggcctgaccctcccccgcctccctctgcccctccccccgcacccccgccctcgccctcgcccagctcgggccttaacccctgccgggccgcggcgggagcctcagccgcgcctgccctctgcccttccttgagcctcgccaagatgtctctccaaggccctcccctccacctctggccttggacgttgggtcgctcgatcaccctcgaggcgcccctcggaacctctccccaccccacagttcctggcaaagcaatgatggggggccagtggcacccggggggggggtacgcccctgcgcaagacacacgcgcgcgcgagacagacagacacacacacacacacacacacacacacacacacacacaccctagattgtgtttgcttcctcttccagaaagtcgccgcgtctgacccccaccccaccctttctctgctcgggttaacacctggtgcccggaatctccagggggaagggatgttgtggtctgagaccggctggccggggccgcgaggtcagggggcccctctgcagaatttctggcctccgggggcagggcgcccacccgccccgcgcggctggaggcgacaggcatgccctgtctgggggcctgcccctttttcccttttaatttccttttctttctgtgctttgcagaaagggcttggcctggcggccggctggactgcagatgtctcttccaggcgccctggagcctcgcagctgccgccacctccaactcaccccatcccccagtaccggggctggggcccgcccgaccagcatttattaagcaccctttgtatgcgaggcccgggctggcgagcctctggctctgggcaggttaacctttaaccggctggacaagcccttccaggagtgacctttcacctcggagtcttgcagccccagccacccagactgtggtcccaccccgccctgagcccagagctggacaccagagcatgcagctgggcctctgagagctctggccaggacagtgccttctgcgcaccccctcctctgcctcccagagccctgatgagacttgaagaattgccctccctggagtagggggaaagattcttagagatcttacaacacttaaaaagaaactgaggttctgggagagccaggcacacccagccctgggcctctcaacctgctccagggacgttctggctgcctgggaggtggaggaggaggcgttagtaaacacgaaaagcaggaaggactaggattagacatgagcaaggacttcccgaggtctagagtcgggttctgcccacagcctgatgtaatccctgctgggagagaggaaggcgtgggtgggcagagacgaccctttggttctgaggctgcatgggaatgtgactggtaatttgggatgagggcagggatcctaggccccttgcctggacctgctaggatctttggtggggagcattggggtggaggtctcagaagggattgaaaagagatttagatgagagacaggcgctgtggctcacgcctgtaatcccaacactttgggaggccaagtcaggaggatctcttgagaccaggagttcaagaccagccggggcaataaagtgagacccgtcttgagcccaggtgttcaaggctgcagtgggttataatcacgtcacgtcactccactccagcgtgagcaagaccctgtctcaaaaaaaaaaaaaaaaagaagagggagagaagactcaaggaatcttgaggggattgtgaaggggagggagcaaagaactaggtttgggggagacaagtcttgcgaggcagctgagagctgggtgggagatgggggaagaaagaccatcgcagatcccagaaactccagtagttccagtcccaaaggctgccccacccccttccagtagcctggccacccctgtgccccctggggcccgcctgggggtggatcaaggctctaccccgcctccctgacccctgcccgcggccctgcagtaacatttgaccttgcggcggccgcaaaccagggacaaaggggcctaggcccatctgctgagggggcacccgtgggaatggccagatcctgctggggcagcctgggaacctgtctccgtcctcccacatgtgaccttggctccctttgcccctccacaggcaacctggtgggaccaggaactcaggtcttagactctggggctcggcagggtacagggaagaaattcagcttctctgccccaccccaacacgagcaaggtggtctgcctccatttccctgctttcttcaaagttggcccaagtccagggacagcgtgtgggtcggaaggtgactagccccagccctcgctggaggggactgtgctcgccaccatacttcttgttctgtttctggggtcaggttgactggattcaagtccaggccgctgactggcgctgacctcaggctgacgtggtcctgccctgggagaggcggtgaacacacctgcacaggtgaggcctggagcacctgcccccaaggctgggaatgaaagtctttctaatccctgtctcgggtttcagctgccaccctgaagggggacagctggccactaatccaagcttggctgggtcgttccaagctcccctttcccagactcagccagtcctggtgtggaggggcagggagatgtgacttatgcaaatgacatgctaattcattgcctgctattaacctgacacgtcccacagctcctgggcccccaggagaaagctggaactggccaccattggcattcattctgagtttctcttgaagtacaacgccccctgagtcccagactattacctttgctatgcctgtcccccacccagaaaccctttaccttattttatttatttatttttgagacagactctcctattttgcctaggctggtcttaaacccctgggctcaagcagtcctcctccctcggcctcctgagatactgggattacaggcaagctcgaccacatggagtccagaaacccttgaccttagctttgagttagtagcaactcgtcatccacaccctgaatctgaaccattccagcttcagtctccctcctttttgttttgttttgtgttttatttatttatttagagacagagttttgctcttattgcccgggcacgatcttgttgttggcgcgatctcggttcactgcaacccccgcctctcaggttcaagcaattatcctgcctcagtctcccgagtagccgggattacaggcatgtgccacaacacccagccaatttttgtatttttagtagagacgggggtttcaccatgttggccaagctggtctcaagctcctgacctcaggtgatcctccccgcctcagcctcccaaagtgctgggattacaggcatgagtcaccacgcctggcctgtttttttttttgagacaaggtcttactctgtgacccagactggagtgcagtggcgtgatctcagctcactgcaacctccacttcccaagctcaagttaccctcccactttagcctcctaaatatctttataggcacatgccaccacgcctggctaatttttgtatttttttgtagaaatggggttttgccatgttgcccaggctggtcttgaactcctgggctcaagtgatctacccaccttggcctcccaaaatgctgggattacagatgtgcaccactgagcccggcccccttcaggaaaatctgccagccaaacccagcatctccctgggaaggggctgccaggagaagctctgtccagtccccatgaatccctccctgggcttcgggagacaggccagttggaacttcagctgtggctatgcaacctcacggacccccgaaatgcgtcagtcccagggacctggtcccatagcccaggttgcttctggcctgaccccactgatatgaagttcacattccacttggtgccaggccaaagacacctgagtctttcttcattgcctggccacaccccatcaggccctggacacccatgtgcaccagcttccctcacgccaaatgtgccccaacatgccaaatcatgcaacatgacatgatgtcactccaggacagtttatgacatgccacagctgtctggcatgtccagacatggctgggtaaggggcctacagaaaggtgtccccaagctggggaggcgggaggggaggcctgggcttccccagggcccttgcagtggcttcgagcaccgccacctcctcggcctgctgagcctccatgagtgccatctgctgctccaacttccggcgttgctcttcctgcttccggtgggctcctcggaaggccaggaccagggcgctggaaggggtgggtggctgggtcaggaaacagcccccgagtccacccaaggcaagggccgtgtactcccactcccagaatgggggctctttcacattgggtctccaagggtcccagctagctggtcttttgttgttgttgttgttgttgtttgagacagaatttcgcgcttgtcacccaggctggagtgcaatggtaagatctcccctcactacaacctctgcctcgagggttcaagtgattctcctgccttagcctcccaagtagctgggattacaggcgcccaccaccacgcccagctaatttttttgtattttttaatagagacagggtttgaccatgttgcccagactggtcttgaactcctgacctcaggtgatccgcctgcctcagcctcccaaagtgctgggattacaggcgtgagccaccatgcccagcctgttttttcttgttgttgttttttgagatggggtttcgctcttgttgcccaggctggagtgcaatggcacaatctcggctcactgcaacctctgcctcccgggttcaagcgattctcctgcctcagcctaccgagtagctgggatcacaggcatgcgccaccacgcctggctaattttgtatttttagtagagatggggtttctccatgttggtcaggctggtctcgaactcccgacctcaggtgatctgcccaccttggcctcccaaagtgctgggatttcaggcgtgagccactgcgcctggcccagcctgttgtttttttttttttttttttagacagagtcttgctctgtcacccaagctggagtgcagtggtgtgatctctgctcaccacaacctccacctcctgggtttaagcaattctcctgtctctcaagtagctggaattacaggcacgtgcaaagacgcctagctaatttttgtatttttagtagagatggggtttcaccacgttggccaggctggtctcaaactcctgacctcaagtgatctgctggcctcagcctcccaacatgctgggattacaggtgtgagccaccacacctgaccgttactgcctatcttggggcagtggggaatgctaaggcccagagacagccagggatacttctgatatcctggtgggggatggtgccagggggattggggggatgcagaacagtcctacctgtgggctttgcataaatccctgttcagctcggcactctgagaccgtctggctcgccccttctgagccacctgttccagctccctgcgcagagactgcagctgctcctgcaggtccagtgtcctgttgcgaaggagaagagagggggctcacagccccagccgatcctgtttcccaggtctcctcctacccacctgcccacagtattgtcatgtaaacacacctgtacaccggggtacaccttagcttctactgcagacgacacccccgggggctctcacataggctgcctgcccaccccccgcacagcccaggacccaggcacacacctggtgagcgatgctgccagttcctgggctaacttctctgggtcccaggctctgcccacctggccaccatcaatgccactggtgccaccagggacagcaggaaggccctaagggaggcagaagacaagaaagtgacattaacctaggccaagtccgtgcttggcccacactggacattggagctgcccagacagtggcagctgctgtgctctcagagacccacatctggttcgatataccaataagagcaaaattatactctgataagggaaatatcctatttaattaaaaaaaattttttttgagacagagtctcactctgccacccaggctggagtacagtggcacgatcttggctgacagcaacctccgcctcccaggttcaagcgattctcctgcctcagcctcccaagtagttgggattacagacacatgccaccagacccggctacttttcgtatttttagtagagacggagtttcaccatgttggccaggctggtctcgaacctcatctctaaaaataaaatttaggggccaggtgtggtagctcatgcctgtaatcccagcactttgggaggccaagacgggtggatcacttgaggtcaggcgttcaagaccagcctggtcaacatggtgaaaccctgtctctactaaaaatataaaaattagtctggcatggtggcagacccctgtaattccagctacttgggaggctaaggcaggagaatcgcttgaacttgggaggcggaggttgcagtgagccaagatcatgccactgcactccagcctgggcaacagagtaagatacggtctcaaaaaaaaaaattagccaggcatggtggcgggcacctggagtcccaactaactgggcggctgaggcaggagaatcacttgaagctgggaggcagaggttggagtaagctgggatcgcagcactgcactctagcctgagcaacacagtgagactctgtctcaaaaaaaaaaacaacaaaaaaacaaaaacaaaaactagagatccactggaagtccttcctcctgtctaatccttgtttgaaataataataattttttttttgagaagagtctcgctctgtcgcccaggctagagtgcactggcgtgatctcagctcactgccagctctgcctcccgggttcacgccattctcctgcctcagcctcccgagtagctgggactacaggcgcccgccaccatccccagctaattttttgtatttttagtagagacagggtttcaccgtgttagcgaggatggtctcgatctcctgacctcgtgatccgcccaactcggcctcccaaagtgctaagattacaggctgggattacaggcatgagccatcgtgcccggacagtaataatttttttttctttttttttttttgagacggagtctcgtcgcccaggctggagtgcagtggcgcaatctcggctcactgcaacctccacccctccaggtttaagcaattctctgtctcagcctctggagtagctgggattacaggcacgtgccaccatgcccagctaatttttttgtatttttagtagagacagggtttcaccatgttggccaggctggtcttgaactcctgacctcatgatccacccgcctcggcctcccaaagtgctgggattacaggtgtgagccaccgtgcctggccaataataattttttaaaaattaggctggacgtggtggctcacgtctgtaatcccagcactttgggaggccgagacgggcggatcagcctgaggtcaggagtttgagagcagcctggccaacatggtgaaaccctgtcactactaaaaatacaaaaattagctgggtgtggtggtgcacgcctgtaattccagctactcgggaagccaaagcaggagaatcgcttgaacctgggacgcagagattgcagtgagccaagatcgcaccactgcactccagcctgggtgacagagcaagatccgtttcccaaaaaaaaaaaaaaagaaaaaaaaaattaaaggccaggcgctgtggctcatggctgtaatcccagtactttgggaggctgaggtgggcagatcacctgaggtcaggagttctacaccagcctggccaacatggtgaaaccccatctctactaaaaaatacaaaaattggccaggcacggtggctcacgcctgtaatcccagcactttgggaggctgaggcaggtggatcacaaggtcaggagatcgagaccatcttggctaacacaatgaaaccccgtctctactaaaaaaatacaaaaaaaattagccgggtgtggtggcgggcgcctgtagtcccagctactcggcaggcggaggcaggagaatggcgtgaacccgggaggcggagcttgcagtgagccgagattgcaccactgcactccagcctgggctacagagcgacactctgcctcaaaaaaaataaaaaataataataaataagccgggtgcagtggctcaagcctgtaatcccaacactttgggaggctgaggcgggcgcatcacctgaggttcagagttcgagaccagccttagtaacatggggaaacctcatctacactaaaaatacaaaaattagccgggcgtggtggcgcgtgcctgtagtcccagctactcaggaggctgaggcaggagaatcacttgaacccaggaggtggaggttgtggtaagccaagatcgggccattgcactccagcctgggcaacaagagcaaaactctgtctcaaaaaaaaaaaaaagagatgaggtctcgctgtgtggcccaggctggagtgaaatgacataatcgtggctcgctgaagcctccaactccgggttcaagtgatcctcccacctcagccacccgagtagctgggaccactgtgataagggaaataaataacaggaaaccgcatctgaagtcactccaggagggcttccttgaggaggtgatgtctaagctgagatctacaggaggtcgaggactttatgacacaaagagggaagtgaccggtgttcctggcagggacacagaatatacaaaggcttggaggtaggagagatgatttaaagagctgcattaaggacaggtgcggcgactcatgcctgtaatctcagcactttgggaggtggaggcaggcgaaacatttgaggccaggagttcgagagcagcctggctaacatggtgaactgcaactctacaaaactgcatctctacaaaacatacaaaaaatagctagatgtggtggtgcgtgtctgtaatcccagctactcaggaggctgagacaggagaatctcttgaacctgggaggcggaggttgtggtgagccgagattgcaacattgcattccagcctgggcaacaagagccaaactccgtctcaaaaaaaacaaaaaaaaaaaggctgtgattgacaagggctatgttctcattagtaagctactcccctaccaggttcaggcagggcagctcacctgataccactcttcctcgtccccgctgctgccacctccgctgctatgtccgccactgctgtttgccccaccagcctggagctctgcccgttcccaccgcagctgctccagcaggagcacgtgagctggacccagggctcggagggcagcctcccgcagctctaggccccgcttctcacgccgcaccagctgcagccgaagcatcaggtccgccagggcctcctgtgggaccaaggagaggggagagaatttatgcttctacggtcaactgcagggaaactgaggccccaagaggcacccactgaggactattcagacaaaaactgtgacttttggccaggcgcagtggctcatgcctgtaatcccagcactttgggaggccaaagtgggtggattacctgaggtcaggagttcgagacgagcctggccaacatggtgaaaacccgtctccattaaaaatacaaaaattagccaggtgtggtggtgcacacccgtaatcccagctacttgggaggctgaggcaggagaatcacttgaacccggcagtggggcagaggctgcagtgagccaagatagcgccacagcactccagcctgggtgagagcaagactccgtctcaaaaaacaaacaaacaaacaaacaaactaggaccttcaccattcaccatgttcttgtgaggtggaaatatcttcctcccataaaagctacagctgtagaaatggcatttcctagaggggcaagtagcttacataggtcaagtattagttctgtcaaagcttctggagtttctctaactccagaacctcaagtttttcatgccaagctacaaacccaagattgtgttctttgctcccatctcttcccataggaagggcattttggagagccagatttgtagtctaatgagaaactgaaccccagaaaacaaactcctattaatccctcaaaaccccagctccaattctcccttcacaatgcctgcactcagcccagcagaattctcctttgctccttggtcccccgacctcagtaaaggattttgtcccaccaagaaagactgacacagtggccacagcccatttgtacccttgcggccaccaggtcctgctgaatttgtgtcttctccagtcggggaagagctgggccagcctgggtccccagaatggcctgcaccatggcttctgcacggggcacagtgggcatgggtgccaaggtggggccaggctctgagagaatcttcattagagaacggcgctcctggagacgctggacatagcttcggagctggaaagccacttcctgtggggtgggcttatccacactgctgccttcagggctatagaaaacagaaaaggtgcctatgtcaacactggcaggcataggtgggttaagttcatgccaatcctggtagggtccatcaccttccatctcactggccacgatggaatctatgccatctttggtggtccctgtcacaccaacataccccactaggcaccaccttccatcaagaccacatggtggccaggtgcggtgatgcatgcctgtaaccccagcactttgggaggctgaggtgggaggattgcttgaagccagaagtttgagaccagcataggcaacagagtgagaatccgtcttttttttttttttttttgagacgcagtcttgctctgtcgcccaggctggagtgcagtggcataacctcggctcactgcaagctccacctctcgggttcacgccattctcctgtctcagcctcccaagaaggtaggactacaggcgcttgccaccacgcccggctaatttttttttttttttttggatttttagtagagacgaggtttcaccgtgttagccaggatggtctcgatctcctgaccttgtgatctgcccacctcggcctcccaaagtgctgggattacaggcgtgagccaccgcgcctggccgagaatccgtcttcataaaaaattagctgcggccgggcgcagtgcctaacgcctgtaatcccagcactttgggaggccgaggcaagtggatcacctgaggtcaggagttcgagaccagcctgaccaatatggagaaaccccgtctctactaaaaattcaaaattagccgggtgtggtagtgggagcctgtaatcccagctactcgggaggctgaggcaggagaatcccttgaacccgggaggcagaggttgcagtgagccgagatcggaccattggactctagcctgggcgacaaaagtgaaactctgtctcaaaaaaaaaaaaaaaaaaaaaaaagacagggtctcactctgtcacccaggctggagtgcagtggtgcaatctcagctcactgcagcctccacctcccagactcaaggcatcctcccacctcagcctcccaagtagctggtactacgcgggcacaccaccatgcccagctaatttgtttgtagttttggtagagaaggactttcgccatgttacaagggctggtcttgaactactgagctcaaacgatctgcctgcctcggcctcccaaagtgctgggattacaggcttgagccactgtgcccggctgtgggtgccagttttaaccagtaggcattgtcattcatcttcatgccaactgcaatgtctgtcaaccaccatgccaactttgtcaagtagcaacaggccaactgcagttgagcctcatgtcaaccaactacagtgagctccataccgaccttgctggacacagccacaccaagccccgaaacgtggtgagctctgggagccccatcccccagtcaagaccccactcctcaaccaggccagttcccagggttccaggggggtaccttggctgtggattctgctgtgctcctgcatccatggcagcctcctcttgtgccagcagcctccatgcttccttttcagctgcttgcaggtcactcatgggggcttcgtctcctgctcctgagtcggcctcccgcagagcaagcagaaccctgtatgcctcttcacagtgttcactgtgggacactggttctgagtgcttcaggacactcagctcggctgggtgcaatggccctcacctgtagtcccagcactttgggaggctgaggcgggaggattacctgaggtcaggagttcgagaccagcctgaccaacatggtgaaaccccgtctctactaaaaagacaaagattagcaaggtgtggtggtacgcacctgtagttccagctactcaggaggctgaggcaggagaatcacttgaactggggaggcggaggttgcagtgagccaagatggcaccactgcactccagcctgggtgacagagcaagactctgtctcaaaaaaaaaaaaaaaaagaaagaaaaaagaaaaaaaaatccacttagctacatcttgctctataggtgccagtccccacttgctcctgaacccctcttctccccactgccctcagctctggaagcatgcagactcccttagcaaccctgaactaaaattgccttaagttaatttctgggccaggcaaggtggctcacacctgtaatcccagcactttaggaggcccagtaggggggatcatgaggtcaggagttcgagactagcctggccaacatggtgaaacccatctctactaaaaatacaaaaattagctggctatggtggcatacacctgtaatcccagctactcaggaggctgagacatgagtatcatttgaacccaggaggcagaggttgcagtgagctgagatctcaccactgcactccagcctgggcaacacagcgagattctgtctcaaaaaaaaaaattaatttctgaagtggggaaggtgctctccagtgagggttctgtggattggggccatcctcagaaagcccactccctccccagctggtgacatcactggcagggtgcactgacctgtactgcaaggccagatgcaatgctgtggcctcagcctcccgctggcctagctgcatgctgaggccttcacagcggcccttgtatccctgtagcacagctgatagcagacgattaaagcatttgagcttctcaatgctcctgttcccgaaggtggggaagagggaaagtcagaggccttctaaggcagtcaggcctcaatttccaccctttccctccctcctgttgcagcttcagactcctggctttataactcagttggaggaggtgcctgtgcccttatgagctcagcatttgagtctcttacccccggagttgctccatctgggcttccatgatgtgcatctcaggactgaggggctggttgggaagagacccaaggatctgggtgctggaatggctgcggaggcgccgaagcagggggtgagccagggagaaggagtcctgccaagaagaagtgatataactgaccccaattgtcaccaagagcctgggattgtaggcattttgcaaccccaaagctgttggatcccatgacaaagatttgagtctcattcccctgaaggctaaggacatcaagaccatgggattgaacttctcgcactcacctgagtctcccagggttccctgtctgcctcagagctgctagaaccactgcctgagccacctgcttggttgtgggaaagatgtgggcagggctccagcctcaagagggaatcctgcagctcttgaacctgggaaagatgagggggacgtcaggcctaggggctcaaaccaaccaccagccctctctccccaaggcctgttcttggggaagtggcaagaaccctagctggaaggcaagaggcttggatacttagcctgccaaaaatctcactatctgaccttgggaatgtttctcagctgctgaggattttatttttcccagcagaaaaatgggccccactctggggaaaaatgaatccctggactgggctccaaagtttttctaccagcctaagatgagggcttccctctcaatatctcattcagccacatggcttttttatttttatttttgagatggagtcttgctctgttacctaggctggagtgcagtggcacagtctcagctcactgcaacctctgcctcccggattcaagtgattctcctgcttcagcctcccgagtagctgggattacaggcatctgccaccatgcctgacaaatatttgtattttcagtagagatggggtttcaccatgttgaccaggctggtcttgaactcctgacctcaagtgatcttcctgactcagcctcccaaagtgctgggattacaggcatgagacaatgcacccagcagccacatggctttaaatgccacctgtgtgctaaggatgctcaagtttctcccttctgccctgctgtctcctctgagccctggactcagacatatagctgctcccttgaggaccccacgtggatgtctcatggacacttgagcttatcaagggctaaagagatctggtcacccccagccaaacctgcctaccctgtagctcctccatctctcccttctagtccagcaggtcccaaagcctgaagttgtccttgacttctctctagccttcacgctcacacgtcagttccatctgccacatcacccagaatccgtccgcatctctccacttctacaacctccaccatcgtgcatgtctggaccaatgaagtcgcctcctggctctccaggagtccaccctcacctccgccaccagagggcgcctgtgaacacctgcgtcgagcatgcccctcctctgctcaaaaccctccagggctctcaccttaatccaagcaaagcccaagcgtctccttgcagcccacgaggccctacgcgatctgcatttgttctccctctgttctgttctggctccccacactctccctgttgccccctgtgttccagccacactggcctccttcgggtttcttgaacaggccagtcatgctgccactccagggcctactcccaccaccctcagttttctttctttttctttctttctttctttcttttttttttttttttgagaaagagttttcttctgtcgcccaggctggagtgcaatggcgggatctcggctcactgcaagctccgcctcccgggttcacgccattctcctgcctcagcctccggagtagctgggactacaggcacccgccaccacgccggctaattttttgtatttttagtagagacgggttttcaccgtgttagccaggatggtctcgatctcctgacctcgtgatctgtgcctcggcctcccaaagtgctgggattacaggcgtgagccaccgtgcccagcattattattatttttttttttttttgagacagagtctcactccgtcacccaggctggagtgcagtggtgaaatctcggctcactgcaacctccacctcctgggatcaggcgattctcgtgccttagcctccctggtagctgcagaattgtgtcaagcaattctcctgcctcagcctccagagtagctgggattgcaggcacgtgccaccacacctggctaatttttgtatttttagtaaagacaaggtttcaccatgttggccaggctggtctctaactcctggcctcaagggagccacccacctcggcctcccaaagtgctggtgtagattacaggcatgagccactgcacccagccaacctggctgatttttttttttttttttttgagacagagtctcactctgtcccccaggttggagtgcattggcacgatctcagctgactgccatctccatcacccgggttcaagtgattctcctgcttcagcctcctgagtagctgggattacaggcctatgccaccgcacccggctaatttttttttgtatttttagtagagatggggtttgaccatgttggccaagctggccttgaactcctgactttgtgatccacccacctcagcctcccaaagtgctgggattacaggtgtgagccactgtgcctggccaacctggctgatttttaatttttttgcagaggtggcagtcttgctgtgttgctgaggctggtcttgaactcctggcctcaaaggatcctcctgcctccacctcccaaagtgctgggattataggtgtcagccaccacacccagccttaaaaggttttttgaatgaacaaatgaatgaatattgcctacatcaggcccacctcctccctcagacagagagccacatgggactcaggatggccccactcacctctttctgcagcgtctccttctcagctcggatggcctccagggaggcctgcgtgcggaccagctcatcctctcggctactcagggccagccggagccaggcattcctctcggccaggcgagctgcctctcgctggcagctccctgccccttcctgcttcccaagggaacctgctcccccttcgcttgtgccttcgaactccatcggcccagaatggctggggggctggtggcgccaggctgcagccgctgcctccagggagctcagagtgtgctggagggtctgaaacacatcgggggccccattcccagggggcacagtctccttgtactgtagggctgcttctggggcttggtgggcttccactgcaggtttgtggggcacttcgggggctgaggccagttccctgccagagcccccatccatcttcttgtcagtcctgtggacaccaactcaggcacttgagtcactccatgctgggcaaggaattcttttttattttttgagacggagtctcactctgttgcccagcctggagtgcagtggcgcgatctcggctcactgcaacctccacctcctgggttcaagtgattctcctgcctcggtcccccaagtagctgggattacaggctcccaccaccacgcctggctaatttttgtatttttagtagagacagggtttcaccatgttggctaggctggtgtcaaactcctgacctcaggtgatccgcccaactcggcctcccaaagtgctgggattataggcatgagccaccatgctcggccctgggcagggaattctgagggcttaaacttcatggtcttggggaggtgtgagcggagcagggagttggcaagagctgcgtgttctgggactggcatcccagggtgagactgggaggctgtgaattcaaggaagaggctagatagaggtggtgaagaagttggaggggagacctggagctgagaaacagagtgaagttggactgtgacgggcactgggaaaggcctgaaggtgagagacagaagtttctggaaatagggtcttctggggcggcggcttacacttgtaatcccagcacttttggaggccaaagttgggggatcacttaagggcaggagttcaagaccagcctggctaatgtggcctgtctcactaaaaatgcaaaacttagccggatgtggtggcgcacacctgtaatcccaactactcaggaagctgaggctcccgcttgaaccgggaggcaggggttgctgtgagccgagattgtgccactgcactgcactacagcctgggtgacacagcaagactcaaaaaaaaaagaaagtcaggctgaaggcaatagggagctatggtaggtgtgtgagcagagcaggcacatcagcagatctgtggatggcaaagatgcgtctggactggagtgaagggcacagaccaagcgggtcttacctgcttcctaggccttggccactgacctcctccatggggcccagctgctccagcccggagctcaccggaggtggggcaaagctgggcttggagctcccactggctgcctcgacctcctctgaactctcagccacgggatccagttcaccctgcaaatgacccccggggccctgctctgagccaggcaggacaggaccttggggtccccaggatctgggtgtggaggggagagggtgacacttacgggtggagcatgcctccctcgccggcttcggggccgcgtggcccgggcactcattgctgtccagaagccagtgccctctgaatgcttctccttcgtcaacccctaaaaccacagcctgccatgagctcttgcctttgttgtcctggacaaaggacaacctcaatttcctctgctgtgaaatggggcactgactacccctcaggaagggattttgttatcaatgttgattgggcagatttgaatgcctccctggacagggagctcactacctaagaaggttgtcctgatctcccccttcttctctgccttctttaccttcactacgtctttgtccactttcctcctctatttgagcctgggaatgcgatctcaagaattccctctcctccccggccctcctaaatgagaggttcagctctctctacctctctgatcctctgggggtaacttgatcagaggcctgagtcccgggacactctgttggggtcactctgaccactgcctgttcaggcctgggctggccaagcctggcctgggaggggctgggaaacaggaaaccccctcccctggtcacgtgacttgttattgtgttgtttccttctcggggacagcggcttcctgcagccctagcggggcacacatacctgactcccaaggtttcagcccctcctcttctcagcctccaaactcatggcccttctagctctgactcttggattttatttctcaagagctagaatgggccgagcaccatggctcacacctgtaatcccagcactctgggaagctgaggaagacagatcgcttgagtccaagagtttaagacaagcctgggcaacatggcgagacccccgtctttacaaaaaatataaaaattagccaggagtagtggcgtacgcttgtagtcccagctactcaggaggctgaggtgggaggattgcttaacacctggaagttgaggctgcagtgagccgtggtcacgtcactgcactccattctgggtaataaggcaagaccctgtctcaaaaagaaagaaaaaaaaagagctagaatgttcccgtgagctgatggtttttatttggctcccctgtgaacttttcttctctgcctgtctcttcattgtgggctgacagttctcttttttttgagatggagtcttgctctgtcgcctaggctagagtgcagtggcgcaaccttggctcattgcaacctccacctcctgggttcaagaaattctcctgcctcagcctcccgagtagctgggattacaagtgcccaccacaatgcccagctaatttttgtatttttagtagagacagggtttcaccatgctgaccaggctggtctcgaactcctgacctcaagtgatctgccagcctcggcctcccaaagtgctgggattacaggcgtgagccaccgcacccggctagggatgggtttttcccatgttggcgaggctggtcttaaactcctgacctcaggtgatccactcacctcagcctcccaaagtgttgggattacaggcatgagccaccgaccccaccagccccagaaacatttaagagccacttgaagcctcagtttatttatttattttattttattagatggaatcttgttctgccacgcaggctggagtgcagtggtgcgatctcggctcactgcaacctccacctcctgggttcaagcaattcttctgcctcagccttctgagtagctgtgattataggtgcgcgccaccacacccagctaattttttgtatttttagtagagacggggtttcaccatattggccaggctgatctctaactcctgacctcgtgatccacccacctcagcctcccaaaatgctgggattataggtgtgagccactgcccccaactcctcagttgtttttttttttttgagggtcaaagaagccggccacattggccaggctctaattcgagaatagccggaggggctgtgtaaggtgagctttgaagcataaagaacttgccagaaaagcaacaggaggaacagcattccaggcagaaggaacttcctgggcaaaggcttagagccttcaaagagccgctctaggtgacacagcgagactccatctcaaaaaaacaaaaacaaaaacgaaaaaaaaaaacacaacaaaaacccagctctactaaaaatactatatatatctcagccgggcctggtggtgcatgcctgtaatcccagctacttgggaggctgaggcaggagaattgctcgatccctggaggtggaggttgcagtgagccgagattgagccactgcactccagcctgggcgacagagcaagactcttgtctcaaaaaaataaaaataaataaataaatacttctggggctaagggggaagtgtgcactaagaagacaacggcagcctgggcgacagagtgagactccatctaaaaaataaaaataaaaaaaaaaggaaggaagcctagggtagtctgatgcggtggtcctcgcctgtagtcccagctacttgagcgatcgcttggctgtagtgactagccatgatcgcgtgactgcagtctagtttgggcgacagagcgataccctgtctctaaaaataagaaaaaaaaaagccatgaaaaaagaggtaggcttgaaataggcccgacttagcttcgctccacctacagtgacccaataagaccagagtaagtattttttgattcatgcaaatatatgtaaaataaggaacaagaattaagtaattgggaagggccctggatgctcaggccacacccacatgggaatacctgccccacatggaggctcaggccagctccaccaatcaccaatcagctcctcctctttccctaaatcggccttctccgtccctcttagcctatcacattgcaagctccacctctattccacgtttcagcctatcacggtagaagcactgactattgtagtctgattcggccaaaaacaaaaattcactaatttttttaatccaatcacatttcatactttgctccagtgtagccaatcacattccaggtcccgccgcacccagctccaggcagctctcactccaaaccccacccccaacccagtttcagcctatcagtttccaagttctttctagcctcaaccagtttctgtctctgcttgttctgcagcccgctgaactacatttcccaggaggcgtcggggctgcgccgtacaacttccggctgtaaagatggcggcttcctagtgagtcggcggctgatttagaaggaggttcaggctacggtgagccgaaggtgggtggtgaaagcgtgtggggcccgttcctaggggcccagctccctttgccccaagagatccagctcctcgcctttcctggggcttccgcctttatttctggtttctcctgcagtgtagcctccatccttcttgctgccgctaaagccttgtttttcttagaggtgtggggactgcaaggcgctcaaagaccatcttgggaagcccgtgcctatttcccagatagacaaactgctccattcgcgtcctgtttctctccaaggggaaccacagtactaatattttgcttctccctcatgcagacacccgctagggacgagggtgtcctagaggttattattcccttattcaccaagacattttcagttttaggtaacagaaaaccctactcaatctggcttaaggaagaaaaggaagttggtggcttatagattgggtctaacaggagctgggtccaggtggtcagaattcgatctgcagttttctcggtggagaccatttcgctttttaccgaggcaaaaggggcccctcacagctctcaactttattctaccagctctgcaactctaatgagagtctcttttccttgatgacactgctagaagttgcagagctgccactcaatggcctgatttgggtcatgtgcccatccctgagccattttcagtggccagagagctgggatgtgctcactggccgagtaggggcatggggctagcactacgttaaaaaaaaaaagaggaaaaaagaggggggactgttatcttatgtcggagtggctgctcggctgagaggtgtaaaaggcagccattctgcagctgaggaaagtgactccctaagaggagtgactcatcatcagtaagcggctcatcgcccctcttccttcttagtaaccaatcttttttttttttttttttttgagacggagtttcgctctttttgcccaggatggagtgcagtggcgggatctcggctcaccgcagcctcccctcccgggttcaagcgattctcctgcctcagcctcccgagtagctgggattatccgcatgcgccaccacgcccggctaattttgtatttttagttgagacggggtttctccatgttggtcaggctggtctcgaacttccaacctcaggtgatccacctgcctcggcctcccaaagtgctgggattacaggcatgagccaccgtgcccgaccgtaaccaaatgtttttaaaactccaaggggaggattctggcttcccctgtccgtgttccatctagccacacaggagccatggaagtggcagagcccagcagccccactgaagaggaggaggaggaagaggagcactcggcagagcctcggccccgcactcgctccaatcctgaaggggctgaggaccgggcagtaggggcacaggccagcgtgggcagccgcagcgagggtgagggtgaggccgccagtgctgatgatgggagcctcaacacttcaggagccggccctaagtcctggcaggtgcccccgccagcccctgaggtccaaattcggacaccaagggtcaactgtccagagaaagtggtaagtagagggggtggcctggggctctgagatgctagggaacctagcatcttgtcttttgggattaacactgcaaacattccctttgtattcgttacctgtggctgccacaagtcaccgtggacttggtagctttcaacaagagaaatttattctctcacagttcttggggccagaagtcaggtgtcgccagggccatggcccctcaggaggctctaagggagggaattctttcttgcctcttcattttgtctgtctttttttttttttttttttgagatggagtttcgctcttgttgcccaggctggagtgcaatggcacgatcttggctcactgcaacctctgcctcccgggttcaagcaattctcctgcctcagcctcccgagcagctgggattacaagtgcccaccacaacgcccggctaatttttatatttttagtagagacagggtttcaccacattggccaggctggtctcgaactcttgaccttgggtgatccgcctgccttggcctcccaaagtgctgggattataggcatgagccactctgcctgaccctttcttgccttttctagcctctcgtggctcctggcattccttggattgtggctgcatcactctagtctttgcccaattttttttttttgtttttttgagatggagtcttgctctgtcacccaggctggagtgcagtggtgtgatctcagctcactgcaacctccgcctcctgggttcatgccattctcccgcctcagcctcctgagtagctacaggcgcccgccaccatgcccggctaattttttgtatttttagtagagatggggtttctttctttcttttttttttttttgagaaggagtctcactctgttgcccaggctggagtgcagtgcagtggcgctatctcggctcactgcaagctctgcctcccgggttcatgccattctcctgcttcagcctcccgagtagctgggactacaggcgcccgctactacgcctggctaattttttgtattttttagtagagacagggtttcaccgtgttagccaggatggtctcgatctcttgacctcgtgatccacctgcctcggcctcccaaagtgctgggattacaggcgtgagccaccgcacccagccactgagatgaggtttcaccgtgttagccaggatggtctccatctcctgaccttgtgttccacccacctcagcctcccaaagtgctgggattacaggtgttagccaccgcgcctggctgtctttgcctaattctgtccagtcctcatatcctcataaagcctttctcactgtgtctctgtgtcttctccgcttctgtctcctataaggacacttgtcatcaaaacaggatcttatctcaagacccttactttaattacatctgcagagaccctgattccaaataaggtcacattcttttttttttttttttttttgagacggagtcccgctctgtcaccaggctggtgtgcagtggcgtgatctcagctcactgcaacctccggctccctggttcaaatgattctcctgcctcagcctcccaagtagctgggattgcaggcactcaccgccacacccaacaaatttttttttttttgagacggagtctcgctctgtcgcccaggctggagtggagtggcacaacctcggctcactgcaagctccgcctcctgggttcactccattctcctgcctcagcctcccaagtagctgggactacaggcgcccgccaccacgcctggctaatttttttgtatttttttagtagagaccaggtttcaccctgttagccaggatggtctcgatctcctgacctcgtgatcctcccgtctcggcctcccaaagtgctgggattccaggcatgagccaccacgcctggcctctttttttttttttttgagacagagtttcactctgtcacccaggctggagtgcagtggctcaatcagggctcactgcaacctccacctcccgggttcaagcaattctcttggtttagcctcctgagtagctgggattacaggtaggtgccaccacacctggccaattttttgtatttttagcagagatggggtttcaccatgttggccaggctggtctcaaactcctgacctgaagtgatccacccaccttgccctccctaagtgctgggattacaggtgtgagccactgtgccaggccaaataaggtcacattctcaggttctgggtggacatgtcttttgggagccacagttcgatccactatatcctcatttctgtgtttctgtgtcacacattctctggctcatttatttacttatctacttggactcccagttcagtgcccattcttctaagccattgcttttcaaagtagatggcttggctgaggattagaggtcaccatactgccttttcagacaaggcagcttgaagagggccagtgagtggtgtgggggccaacgttaaggtcagaggacgctcaccaccctccaactaccttgcagattatctgcctggacctgtcagaggaaatgtcactgccaaagctggagtcgttcaacgggtaagagggacattttagggcttgaacatgcagccatggcagggagggtccagcccaaaagatacggggctctcactctgaaactcacaccagcttggtctggcttcaggcttggcagtatcagagattagcaagagccaggtgcagtggctcatgcctgtaatcccagtgactcgggaggctgagataggaggatcacttgaggctaggggttcgagactagtctgggcaacatggaccccatctctaaaaaaataaaatatatatatgtatgtgtatgtatgtatgtatttatttatttttgagacagggtgtcgctctcttgcctaggctggagtgcaatggcatgagctcagctcactgcaacccctgcctcctgggttcaagccattcttgtgcctcatcctcccgagtacctgagattataggcatgcaccaccatgcccgtttaatttttgtatttttagtagagacagagttttgccatgttggccaggctggtctcaaaactcctgatctgaagtcatctgcctgccttgacctcccaaagtgctgggattacaggcatgagcacccagcctctaaatgtatttttaaaaaattagcgagcatggtggcgtgctcctagagtcccagctacttgggagggcaagctgggaggatcacttgatcccaagagtttgaggctgcagtgagctatgattttgccaccacactccagcctgggcgacagagcgagaccctgtcccttttttttgttttttttttgagacggagtctcgctctgtcgcccaatctggagtgcagtggtgcgatctccgctcactgcaagctccgcctcccgggttcatgccattctcctgcctcagcctccgagtagctgggactacaggtgcctgccaccacgcctggctaatttttttgtatttttagtagagatggggtttcaccgtgttagccaggatggtctcaaatctcctgacctcatgatccgcctgcctcggcctcccaaagtgctgggattacaggtgtgagccaccgcgcccagccgaccctgtctctttaaaaaaaggaaaaaagaagccgggcttggtggctcatacctgtaatcccattactttgggaggccaaggtgggcggatcacgaggtctggagttcgagaccagcctggccgacatagtgaaacccccacctccactaaaaatacaaaaattagctgggcacggtggtgcgtgcctgtaatcccagctactcgggaggctgaggcaggagaatcgtttgaatctgggagatggaggttgcggtgagccaagatcgcgccattgcactccagcctgggcaacaagaacgaaactccatctcaaaaaaagtaaaataaaataaaaaaagagtagcaaggacaactggtaatgttaaggctatggcccattgaggctccattcatagcaatgagttggagacgccaagaagcaaagtgacttgctcaagggctcagagtaatggggcagagccaggattcggacccaggcctggctggccctgaagcccttgtctggagtcatgtgctgcctgcagctgtatctggagtggggggcagtttgggttgcaggacctggatggggcttgaggacctccttggagatgttgaaggtgacaccttcttcccctcagtggcattcacaactgcccatggctgagcaaagttcctgcaatgactctaggggaaacttgagccccatgctgcgcagagggacccatttggagagggcaggagctccgatgtcagccagactgggtttgtggctgagctccgccacacccctgcagtatgacctatacctccagggccttatcatgcagggttttcagaggagggtggctgaaggaagtttttttttgtttgttttgtttttttttttttttttgagacagagtctcactctgtcgcccaggctggactgcagtggcgcgatctcagctcactgcaacctccgccttctgggttcaagcaattctctgactcagcctcctgagtagctgggattacaggcactcgccaccacgcctggctaatttttttgtatttttagtagagatggggtttcaccatcttgaccaggctggtgttgaactcctgacctcgtgatccacctgcctcagcctcccaaagtactggaattacaggcgtgagccactgtgcccggccctgagggaaccttaattcccctgtactctctgcctccccagctccaaaaccaacgccctcaatgtctcccagaagatgattgagatgttcgtgcggacaaaacacaagatcgacaaaagccacgagtttgcactggtggtggtgaacgatgacacggcctgggtgaggctgcggcaggcgctgggtgccctggggtcccctggggcccggggagcatcgcactgaggcctctgcttccctgcagctgtctggcctgacctccgacccccgcgagctctgtagctgcctctatgatctggagacggcctcctgttccaccttcagtatccttcctggcagagatgtccccatgaagggggctgtctccttctgtcatccttggggcccaggaaagtctaagtcatgactctggctggctgaggttcagatctcagatctgccaaggctgggaaagtcacccctctgagcctcagtttccccatctgtactgtggaaggcacaaagttgcctaccccatggagatgctgtaacaatacagaagcaaaagtacctgatttggtccgggcatggtggtccatgcctataatcccagcgacttgcgaggctgaggcacaagaatcacttgagtccgggaggcggaggttgcagtgagctgagatcttgccactgtactccagcctgggagacagagtgagactccgtcttttttaaaaaaaaaaaagaaagaaatacctgatttgtattcaggaggtccaaaattcatgcacaaggggatcacctcacacaggactgggcatacagtcagtgctcaataaatggcagtgtgtgacagaagtgtcaccattgttcctacagccacttgaacctgggcgcaggacattttatggtaatttggacataaaaggctcatgtgtggcccaaaactgaaatagaataggactctcgtaagttaaaaaaggaataaatggtgagagttttttccaggaggacaagacacccctggctcttttcattttgaggagagtggccccagccatgcaggaaaggggacctttttttatttttgctcctgttgctcttgttgccctggctgagtgcagtgatgcgatcttggctcattgcaacttccacctcccagcttcaagcgattctcctgccttagcctcccaagtagctgggattacaggtgtgcaccaccacacctggctaattttgaatgttttgtagagatggggtcttgctatgttgcccaggctggtcttgaattcctgggctcaagtgatcagcccaccccagcctcccaaagtgctgagattacaggcatgagccaccatacccggccccattctgttttaaaacataaattagattccatcccatcccatctctgctccaaaacctcccatggctccctgtggatcttatttattattatatttttttttgagatggagtctcgctcttgttgcccaggctggagtgcagtggcacgatcttggctcaccgcaatctccacctcccgagttcaagcaattttcctgtcttagcctcccaagtagctgggattacagacatgtgccatcaggcccagctaattttgtatttttagtagagacagggtttcaccgtgttggccaggctggcctcgaactcctgacctcagatggtccacccgccttggcctcccaaagtgctatgattgcaggcgtgtgccaccatgcctggcataccaagagtcttaaagtcatccggtaccagcatcctattttgtgatccatgctgaggggaatttgtgtgtcagagagggcaagtgacttggccagggtcacatggtgcgtccctaggggtgccgggtctcctctggtatcgggatcggggaagccacctgtttcccgctcactcgtgctctactagccttctccttagcacccccaccagatctggaaggacttttcagcctcatgtaagtcccctgtggggaaattcttattcaccttcaaagagaagggtcacttctgggaaaaagctccaaacggcacagaagtaatctagggagccttaaagcctcctcccttcctacctcgccccgagcaattcctcatttatgtgtgtcttgggagcatgggggctggtggagatgcacatgctgctaggcagctccagctgacggcagtgatgggggatgttcaggacactgagggtggccgggcccagtggctcaggcctgtaatctcagcactttgggaggccgaggcgggcagatcacctgaggtcaggagtttgagaccagcctgcccaacatggtgaaaccgcgtctctactaaaaatacaaaaattagctggccacctgtaatcccagctacttgagaggccgaggcaggagaatcgcttgaacctgggaggtagaggttgcagtgagccgagatctcaccattgcacttagaggggtggggctgggaacatgctcagggcagagggaaccgcttatgggatgcctcacaggcagcagtgaacttgggagacatcagtggggcctcacctgcccggtgagcatctggggtctctctcagggtgataagaggggcagacccccacaggctgctctgactgctccctcctcccgggtatgcagccagcagaaaactgagcttccggtcacagagaacgtgcagacgattcccccgccatatgtggtccgcaccatccttgtctacagccgtccaccttgccagccccagttctccttgacggagcccatgaaggtgggtgaggcctgggagagggaggggtgcctgcagccatgaggatggtggttagacaccaggagggacttccaaccacagaggctggggtgcctagaggtaagttcccagagtctgaggcagaaatgggggagctatagtcatggggcacggggtgacccaagccccagaggctggtgttctttacttcccctgcagaaaatgttccagtgcccatatttcttctttgacgttgtttacatccacaatggcactgaggagaaggaggaggagatgagttggaaggtgagaggctgcagcaggtgtgagtagcaggcgggtgtggacaggatgtcttggaacacacctgcactgggtctgggggtctctacctccatttgatacccctggaaccctggttggggtaggtcatggcattggtcattgaacagccgtttcccagttgtctgctgtgactgatggggtggcagccattgggacgatggtccaggcaacatgttgagtcctgcctcccccatctccaacgttccctgcgttcctttctttcttgcttgcttgcttgcttttctttcttcttctttttttttttttttttgagacagagtctccctctgtctcccaggctggagtgtagtggcatgatctcggctcactgcaacctctgcctcccgggttcaagcaattctcctgtgtcagcctcccgagtagctggggttacaggtacctgccatcataccaggttaatttttgtatttttagtagagacggggtttcaccatgttggccagactggtcttgaactcctgatctcaggtgatctgcctgcttcagcctcccaaagcgctgggattacaggtgtgagccaccacgacccgctccctcttccctttcttcctgcctttgacctcgctgcaccctcagcctggagcatccatccctcttggactccccaggccctgctgggccttcacatcccagacctgaattagctgtgggacctcgagtggactacttacttctctgagcctcagtttacccaactatgaacagggaattgagaccagctcctccttatatctcagtacccaaatcaaaagtcccccctctagccaggcgtggtggtgtacgcctgtggtcccagctgctcgggaggctgagacaggaggctcgctagagctcgaaaggtggagattgtagtgagctgtgatgaagccactgcactccagcctgggtgacagggcggagaccctgtgtcaaaaaataaaaatacggccaggtgtggtggctcacacctgtaatcccagcactttgggaagccgaggcgggtgactcacttgagttgggagttcggaccagcctgaccaacatggagaaaccctgtctctactaaaaatacaaaattaaccaggcgtggtggcacatacctataatcccatctactcaggaggctgaggcaggagaatcgcttgaacccgggaggcagaggttgcggtgagccgagatcgtgccgttgcactccagcctgggaacaacagcgaaaccctgtctcaaaaaaaaaattaaaaaaataaaataagtaaaataaaaagtccctcctcttgagaagccctccctgtttttcaagaaggatcaaagtgggggccaggagaatgtgtctgtatctgactgtgtgcctccacactggggactcttttttttttttgaggcggagtctcgctctgtcgcccaggctggagagcagtggtgtgatctcggctcactgccagctccgcctcccgggtttgcgccattctcctgcctcagcctcccgagtagctaggactacaggtgcctgccaccacgcccggctaattttttgtattttttagtagagacggggtttcactgtgttagccaggatggtcttgatctcctgaccttgtgatctgcccgcctcagcctcccaaagtgctgggattacaggcgtgagccaccgcgcccggcccacactggggactctttgggggccatgactgggacctcttcagatccttaacactgggtccatggcggggaatgtttgctgaatgtgtgaatggtttctgcttggcaaactcctcttcaccctttagaacccaccccagatgtcccctcttctgagaagccctccagggatatgaagggcctgttggggtaacctctgcctgaacagcccttcactgacccccgcctccccggcaggatatgtttgccttcatgggcagcctggataccaagggtaccagctacaagtatgaggtggcactggctgggccagccctggagttgcacaactgcatggcgaaactgttggcccaccccctgcagcggccttgccagagccatgcttcctacagcctgctggaggaggaggatgaagccattgaggttgaggccactgtctgaaccatccctgtacatctgcaccttcttgtgcaaggaagtccttggcctaaagccttggttctcaaactgggttccttgggacctccggggtgggggggttccaggaggcacgtagggtaccttgcagggtcctaggagggaaacccaggattccaggagggatcccaggaactgtgggcacccattttctgtgtctcccagcccatttccactcctagtttgtcatggataatttttgttcttccctgtgtgatttttgccatcaaaataaaaatttgagactcgttaaccgaagtccacgccaatcactttgtgttaatggggatcatcttcattgcaagtgatggaaaacttagccactgagcaaaggtgagtggctgctttcttgtagatgaaaaagccccgggatgtggaggttgcagcgagttgagattgcaccactgtactccagcctggtgatagagtgagagcttttctcaaataaaaaagaaaaattcaaaaataaaaaagatgaaaaagccaagagaacagcttcaggcttggctgtgtccaggtgctaggacaacattgccatttgggagggtactacatggttgctagtcaatgtgccctgcttaccccccaaccaatggaaaggtgtgtgatggcttcaaccactccccagaccccaatccaggtcaaggcagagttctctcagcatctggatatgattggactcccccggggggatacatgaccttcaattaagagctagtcatgtaccagggttgtgtgatgttctgatgagccaggcctggatcatacatccctaagggggaggtttaagagctccatcagcagtactgaggccatgataggagggttgcttgaggccaggagttcaagaccacgctggacaacatagcaacatttcctgtctctacaggaaatgcaaaaattaagccaggctcggtggctcacgcctgtgattcccagctacttgagaggctgaagtgggaggatcacttgaacctaggaggtcgaggctgcagtgagctgtcatcgcgccactgcactctagcctgggtgacagagcaagaccctatctcaaaaataaacacaaacagctttattgagtgactgcttttcctccctatgagcattttttggaacctatcgtgtgtcaggcccttgtgcccaagcccctgttcaatccccgcatcaacctcgttaggattctcacattttgcagatgggacactaagactctcagaggtccagccctccaaaatactgaagtcctagttccgctggattgaaaatgggcaacgcagaacggggactggaaattttttaaaaattgtttttaaagacggggtcttggccaggcgcagtggctcacggctgtaatctcagcactttgggaggccgaggtgggcggatcacaaggtcaggagttcgagaccagcctgaccaacatggtgaaaccccgtctttactaaaaataaaaaattaggcgtgatggtgcatgcctgtaatcccagctactggggaggctgaggcaggagaagctgttgaaccctggaggaggaggttgcagtgagctgagatcacaccactgcactccagcctgggcaacaagagcaaaactccgtctcaaaaataaataaataaataaaacaaagacaaggtctccgcctgtaatcctagcactttgggaggccgaggcgggcggatcacctgagatcaggagctcaagaccagcctggacaacatggtgaaaccccatctctactaaaaatacaaaaattagccgagagtggtggcacatgcctgtaatcccagctacttgggaggccgaggcagaatagcttgaacctgggaggcaaatgttgcagtgagcccagattgcgccactgcactccagcctgggcgacagggtaagatccggctcaaaaaaaaaaaaaaaaaaaaaaaaaaaaatagggcctcactccgttgcccaggctggtctcaaactcctgcactcactaaaagaaaagaaaagcaacaacaaactagtaggctcaaacgatcttctctcctcagcctcccaaagcactgtgcttaaaggcgtgagctgggccctcggcctgggggttggaaattgaagcctctattttatgtatttatttattttctgagacagagttttgctctgttgcccaggctggagtgcagtggtgtgatcatggctcactgcatcctcgaacttccgggctcaagagattctaccaactcagcctcccaagtagctgggaccacaggtgcaagccacccacgcccggctagttttttgtatttttttgtagggactgggtttatccaagttgcccaggctggtctcgaaccccagagctcaagcaaccctcctgcctgggcctcccgaagtgctgggattacaggtgtgagccaccgtgcccggcctaagcctctcataaggccgtgctccctgccagaggccacccttgaagaagattccctgagacttaatgacctggggcaccccggactttcttaatcgtagctccacccactcgagccgggtgccttcgcgtttcccgtttttaaatgagatagtggcacacccggtggcatcctcccacccgggctcttatcggcggtcccagaccctgcttgagcgcctccgggtgtcaagggcccctgaggacactaaagctctcgaaccccgatgtggacccccgtgcggcgcggggcagcctggctgggaaccctgctcggccctggagaggggccccccgagccgaggggaggagcggcgcatgcccacaagccccccgcgggaagtaggaaatcgaccgaccaggcggtgcgcttcggacccagccagggcatgtgctcggaggcccgcctggctcgcaggttgcgggatgcgctgcgggaggaggagccgtggtgagggcggggccgggggcgggccaggagtgggggtctttggccggggtccactctgaccgcggtgtttgcagggcagtagaggagctgctgcgctgcggcgcggaccctaatttggtgctagaggacggcgcagcggctgtgcacttggcggccggagcccggcacccgcgcggcctgcgttgcctcggggccctactgcgccaaggcggggaccccaacgctcggtaagatagagcctgggtccggggcggggtctccccaagccgaagtctgggaatccgggaaggggcgccccatcatcccgggccaggcctcggggctcgagggtggggtttaggggatcttggggagggaacttgggggtccaagggcaggggctagggctcgagggaggcgctggggtcccagaccgagggcgtggaatggggctgcgctaggaccaaagtggggatcaagggttcggatattggagtggaggcaccagggtcagacggcagaggtttgggtcctggcctgaggtcatagcatctaggttccaagggcagtgtaccagggtggacggcggagatccgggaggccgagaacgaaggctccaggtccccagagcggagatcggggttcctgccgggaggctgagtccgcaatgacccctcttgcgctgccgccccagatctgtcgaggcactgacgccgctgcatgtggccgccgcgtggggctgccgccgcggcctggagctgctgctgagccaaggagcggacccggcgctgcgcgaccaggttgggaggcactgcgcgggcaaagaaaggctgggtgagcccagagggagggaaggaaggtaagagggcctcgggcgccccctgctgaccgcgcccctgtaggacggactccggccgctggacctggccctgcagcagggacacctggagtgcgcgcgagtcctgcaggatctcgacacgcggaccaggacccggacccggatcggggcagagactcaggagcccgagcctgcacctggcagtgagtagggcctgcagggctgctggggcttgacttctggaccagtccctgacatccagggtcttccccaccccacccattggttctgaccgtctcacatccactatttgtggccagctctttcggcctcagacactctgatctcctttttctgtttgatcctattctcatcgctgtctcatccctcctcctctcctctctggcccccactctcacctgcagccccaggcctctctggacctaccgatgagacgctggactccatagcactccaaaagcagccatgcagaggtgacaacagggacattggcttggaggctgacccaggaccccccagcctccctgttccccttgaaactgtggacaaacatgggagctcggcgtcccctccagggcactgggattacagctcagacgcctctttcgtcacagcggttgaggtctctggagctgaggacccagcctcggacactcccccctgggctgggtcattgccaccgaccaggcagggacttctgcatgttgtccatgccaaccagagggtacctaggtctcagggcacggaggcagaactgaatgcccgtctgcaggccctgactctgaccccaccaaatgctgctggcttccagtcctccccttcctccatgcctctcctggacaggagtccagctcatagccccccacggacaccaacccctggagcttctgactgccactgcctgtgggagcaccagacatccattgatagtgacatggccacgctctggctgacagaggatgaggcaagctctacaggtggcagggaacctgtcggcccttgccggcacctgccagtctccactgtgtctgacttggagttgctgaagggactccgagcacttggtgagaatcctcaccccatcacacccttcaccaggcagttgtaccaccagcagctggaagaagcccagattgctcctggttagtcttcccagggcacatggagtccagggagcctccaggaatctcccggagaaccccagctctcagccccactttcctccccatctcagaatcatcccttcctccatctcccttgacttccaggcccagagttttcagggcacagcctagaactggctgcagccctgcggacgggctgtattccagatgtccaggcagatgaagacgcgctggcccagcagtttgagcagccagatcctgccaggaggtggcgggagggggtcgtgaagtctagcttcacctatctgctgctggaccccaggtactcagggcaggaaagccccagaaatagaaactagaaaatttggggattggtttttatttgctgtgtgcccttaagaaagggactggccctagaatcatcagctgcttcttcttctttttttttatttttttaagacggagtttcactcttgttgccaaggcaggagtacaatggtgccgtctcggctcactgcaacctccacctcccaggttcaaacaatcctcttgtctcagcctctcaagtagctgggattacaagcacctgccaccacgcccgactaatttttgtatttttagtagagacgaggtttcaccatgttggccaggctggtctcgaactcctgacctcaggtaatccacccaccctggcctcccaaaatgctgggactacaggtgtgagccaccgcaccggcctctttttttttttttttttttgaggcggagtctcactgtttcgcccaggctggaatgtagtagcgcaatcttggctcactgcaacctccgcctcctgggttcaagtgattcttgtgcctcagcctcccaagtagttgggattacaggcatgtgccaccatgcctggctaattttttttgtaattttagtagatatggagtttcaccatgttggccaggctggtcttgagctcccagcctcaagtgatcctcctgccttggcctcccaaagtgttggcattacaggcatgagccccggctggccatggtggctcacgcctgtaataccagcactttgggaggctgaggtgggcggatcacctgaggtcagcagttagagaccagcgtgttcaacgtggagaaaccccatttctactaaaaatacaaaattagccaggtgtgttggtgcatgcctgtaatcccagctattcaggaggctgaggcaggagaatcacttgaacccaggaggtggagattgcagtgaactgagattgtgccattgcactccagcctggggaacaagagtgaaactctgtctcaaaaaaaaaaaaaaagaaagctgctgaatgtctttggggagccgctgactctctctgatcctgtaatcaggagtcactagacatgggttcaagatatgttgtgactttaaggactgcctctggggaccactgtatccacttttccctgtctgagctatccccttcatccagggagactcaggacctgccagcccgagccttctcactgaccccagctgagcgccttcagactttcatccgtgccatcttctacgtgggcaaagggacgagggcccggccatatgtccacctctgggaggcccttggtcaccatgggcggtcaagaaaacaggtgtgaggacagggatcagggttcagcgagggcagtcgggccatgggcaggggagggtattgggggtgctgactcctgattctgccctagccccaccaggcctgccccaaggtgcgtcagatcttggacatctgggccagtggttgcggtgttgtgtccctacattgcttccagcacgtggtcgctgtggaggcttatacacgggaggcgtgtattgtggaagccctaggtgggtgcctggtacctagaatgggggtcatatgaaaggcatttggcttcccagttccctcatttttttccttctgaggggtgttcatttgttgactgagcaattattgagcaccaactttgaacctgcacatgcatgtattttgctccattggtttatccccactcaagggcaatacacattgggtttgctgtcacatacttttttgtgtgtgtgtgagactctgtcgcccaggctggagtgtggtggcgtgatcccgactcactgcagcctctgcctcccaggttcaagtgattcttgtgcctcagcctccccagtagctgagattacaggcacatatcaccatactgtgccaagctaatttttgtattttttagtaaagacagggtttcaccatgttggccaggctggtctcgaactcctggcttcatgtgatctacccaaagtgttgggattacaggcgtgagccaccatacccagccgcctgctgtcacacacttctgctggatggggaggtgtccccatggctgcccctgtgaccccacatccaatttctccagggatccagacgctcaccaaccagaagcaagggcactgctatggagtggtggcaggctggccacctgctcgtcgccggcgcttgggggtgcacctgctgcaccgtgccctccttgtcttcctggctgaaggcgagcgacagcttcatccccaggacatccaggcccggggctgagtgctggggagttggccatccagcctggggagaaatgtttgaatgttccagctgccccatgctgacagcagcccccatctctggtttcagaaggggtgtgtgtgtgtgtgtgtgtgtgtgtgtgtgtgtgtgtgtgtgtttgtgtgtgtgtgtgtgtgtgtagggagcacccaggcagatctcccccaggctgagagaggactttgttacagatggtactgctggagaggtagtaagtagtgagctccccatcgtgggaggaggacaagaagggaagcagaaggtgctttggaacagtccggtgcttctgtaagaggcgtttgaacctgggcaactccacctggaataggagctgggtaaaatgaggctgaaacctactgggctgcattcccagatggttaaagcattctaagtcacgggatcaggtaggaggtcagcacaagataacgggtcataaagaacctgctgataaaacaggttgcagtaaagaagccggccaaaacccaccaataccaagatggcgacaagagtgacctctggtcgtcctcattgctacactcccaccagcgccatgacagtttacaaatgccatggctggccaggcgcggtggctcacgcctgtaatcctagcattttgggaggccaaggagggcagatcacctaaggtcaggagttcaagaccagcgtggccaacgtggcgaaaccctatctctactaaaaataccaaaattagctgggcatggtggcgcgtgcctgtaatcccagctactaggggggctgaggcaggaggatcgcttgaacccaggaggtggaggttgcagtgagctgagattgtaccattgcactccagcctgggcaacagagcgagagtctgtctcaaacaaacaaacaaaaaaacaaatgccacatcaacatcaggacgttaacctttagaccctatatggtctaaaaaggggaggcatgaataatccaccccttgtttagcatatcatcaagaaataaccataaaaatgggcaaccagcagccctgccctgtctatggagtagccattcttttattcctttagtttcttaataaatttgctttcactgtactctatgaactcgccctggattctttctagcgtgagattggagaaccctctcttggggtctggatcgggcctttctggtaacactttggcagcttggtgctgtcaaaatggatggagcctgccaggcgcggtggctcacgcctgtaatcccagcactttgggaggctgaggcaggtggatcacaaggtcaggagattgagaccgtcctggctaacatggtgaaaccccgtctctactaaaaatacaaaaaattagacaggcatggttgcaggcggctataatcccagctactcgggaagctgaggcaggagaatggcatgaacctgggaggtggagcttgcagtgagccgagattgtgccactgcactccagcctgggcaacagagcgagactctgtctcaaaaaataaataaaataaaatggatagaggctgcttttaccgcccagacatgggacacccacatggcgggttggactgggggatcctcagctgcactcaggatatctacccagctcaagagccaagttcactgctacccagccgtgagacctctgatcagtattttatctgcctgagcatcagtttccttggttgtacagtggaggcagtaaagaggtcctactccaggggatcattgtaaggtcatgttggggctgggtgtcacgcttgtaatcccagcactttgggaggctgaggcgggagcatagcatgagcccaggagtttgagaccagcctgggcaacatagcaagactctatctctacgaaaagtaaaaacattaggcggatctggtgggtgggcctgtggtcctagctgcttgggagcctgaggtgggaagattgcttgagcctgggagttggaggcttcaaggagctaccatcacagcactgcactccagcctgggcgatatcaagatcctgtctcttaaaaaaactataaaaatttaaaaataaggtcatgtgagcaaagtgtgtggctcagagcccaaagtgtgtggcagtgcagcccaggcgagaacttgctggaggaaggggaggtgtgggggccctcaaggggccgcctgtgtgatgaggcgtgagcagggctgggaccctcctcaggatcattgtgcaaccccagcctcccctgttgcttctgggaacctgtttatccactataaaatgggattattggccgggctcggtggctcacgcctgtaatcccagcactttgggaggccgaggcaggcagatcacctgagttcgggagttcgagaccagcctgaccaacatggagaaaccccatctctattaaaaatacaaaaattagctgggcgtggtggcgcatgcctgtaatctcagctacttgggaggctgaggcaggagaattgcttgaacccgggaggcggaggttgcagtgagccaagatcaagccattgcagtccagcctgggtaacaagagcaaaactccgtctcaaaaaaagggagggatcattaataataacccggcagggcgtggtggctcacgcctgtaatcccggcactttgggaggccgaggcgggtggatcacctgaggtcaggagttcaagaccagcctgaccaacatggtgaaaccctgtctctactacatacaaaacatgagccgggtgtggtggtgagcacctgtgattccagctacttgggaggctgaggcaggagaatcacttgaacccgggaggcgaaggttgcagaaaactgagatcgcgccactgtaccccagcctgggcgacagtgagactccgtctcaaataataataataataataataataataataataataataataataataataaataacccgacttccagcgatgctatgcgacttcagaccattcatgtgcaaaggtcttaagtaaataccaagccgccatcctggtgagatgtcagcggtctggtttcgggcgggcgggggtcgggggggggtcgagggcatttaagcttctggaagtcgcttctgcaaagggcccggtgcatttagggacttgggagagatccgctgcctcattggtttcaggacctgccggtcatcacggcggtttagccaaccaggtcccccagggggcgggctgtgacctgggccgagtttccacccacctcgccactgcttagccaccggctgctcctcggggaatggctggtattgtgattaggggtccagtctctggagtgggtttgggctcgaccacttgtaatcgagctgaagaaaccgctctctgagcttcactttcctccagtgtaaaacaggggccaggcaccgtggctcacgcctgtactcccagaactttgggaggccgaagcgagtggatcacctgaggtcaggagttcaagatcagcctggccaacacagtgaaacactgtctctactaaaaatacaaaaattagccgggcgcggtggcgggtgtctgtaatctcagctactcgggaggctgaggcaggagaatcgcttgaacccaggaggctgaggctgcagtgaaccgagattgtgccactgcactccagcctgggtaacagagcaagacactgtctcagaaaaaaaaaaaaaagtgtgaaacagggatgcctcccagttgccaaatctaataataaagccacaggtgttatgacactgtgccatcgccccagaatacacaaacaggacattggtaaagaacctagagcccccagaagagatgggatttgtctaacacagggtttcccaatcttggccctaatgacatttggggttggcttattctttgctgtggggtctgtcccttgcatttcagggtgatgagcagcgttcctggcctccatccactagaagtcagcaacacccatgcacccccaaacatggcgatcaaaaatgtctccagaagttgccaatggacacaattgcccccctggctaaactaaggatggagctcacaaaccggtggggaaaggacagaaccgagggaaagatttcctccctcctcctgtaatacacagaaaccacagataggaccagatatacatggaccagaataaaatgtaggtgaggtgcggtggatcacgcctgtaaccccagcactttgggaggccgaggcgggtggatcacgaggtcaggagttccaagaccagtctggccaagatggtgaaaccccgtctctactaaaaatacaaaaattagctgggcgtagtggcaggagcctgtaatcccagctactccagtggctgaggcaggaaaatttcctgaacccggggggcggaggttgcagtgagccgagatcgtgccactgcactccagcctgggcgacagagtgagactctgtctcaaaaaacaaacaaacaaacaaacaaaaacaaaaccaaaacccaactaaaagacagatttggtggtttcaaaagaaaagtcttcttgacaaaggtggccctaaaccaagctgaaagatataacacgggaatagtaaaaggtcctgacttgctgggtggggttggatgagtcgaattcaatgaaccagtgggtggcaggcattcaacacacagcctggaaaacagtgggcactcaattatggcagctctaattccatgcaacacccactgatcttcacctaaacctcggttggatctcttccggccagggaagggctcatctcgtttttttttgagaaggagtatcgccttgttgcgcaggctggagtgcagtggtacgatctcagctgaccgcaacctccacttcctgggttcaagcgattctcctgcctcaggctccccgagtagctgggaccacaggcgcgtgccaccattcctggcttgtctttgttttttgttgttgttgttgttgttgtttgtttgtttgttttagatggagtctcgctctgtcacccaggctggagtgcagtggcacgatctcggctcactgtaatttccgcctcccgggttcacgccattcttctgccacagcctcccgagtagctgggactacaggcgcccgccaccacgcccagctaattttttgtattttttactagagacggggtttcactgtgttagccaggatggtctcgatctcctgacctcgtgatccccccacctctgcctcccaaagtgctgggattacaggcgtgaaccaccgcgcctggcctgtctgcatttttaaatagagacggggtttcaccattttggccaggctgttctcgaactcctgacctcaggcgatactcctcggcctcccaaagtgctgggattacaggcgtgagtcaccacgtccggccggggtcacctcttgataagttgcctcctgccctgggggatactgtccaaggagcctcagccttctgaggtacgaggggaaattcaggaagctaacgtggacaccagacattgtcgaagtcgatcctgagcgcgaggcaccagcctgagcccagtctgcagatgggaaaactgaggctccaggcggcgaacaccctgccctgtggtcacccagcacaggtccggagactccgattgtcacttctgtttattgagttacaagttgagatgtgcaggttcggtggcgccagcccccccatcccccccccttgggcaaaaatagctcccagcgccgaggaatggggggtaggaagggtctcggataacgggatggggcctcgagggtccctgtggggctcgtgggtcccaggatcaagcacggctgacacggaagacagcggggtggggggcctgccttggccgtggcgttggggggaaggtgagggagagcttctgtacaaggtcatcttccgtgagggtcccggctgcggccccaaaacgccgatgggccccgcgggacggaagcggagagcggaatgtccgctgggctccctcggatgccacgccccgcccaggcagcctgggggcgtctccctgacctggccccgcccaccggagcgaacggcccgcccaggtggtctgcgctgcagacctggcgcaggctcgggcctcctcctgctgcggctgtgctcaccaagcgatgccccgccggcccagcggctacttcttgtcttctggaggcgccggcagtggctccggtagagccttgggcgagggctcgggctcccagagcaggaattcgtggagcagcgtgttgaccgtctcagggcattccagcatcaccatgtggctgccctcgtcgatgagcttcaggaatgccaggagcaggatctgcagaagacgcagggctcaaggtaggcgggggcaagagggtggagagaggccaggcttccctgggactccgccatacacacatggcccacagcatccaaaagtccctcctcccatctaccctgcatctctccacttccactcaagggggagctggaggatggcctgtagccctgctggaacccaactagtattcaggcatccagcatttattaagtgtctacagtatgccaggagaaggattttcttctttttttcttttctttctttttttttttttttgagacagagtcttgctctgtcacccaggctggagtgcagtggcgtaatctcggctcactccaacctctgcctcccggcttcaagcgattctcttgcctcagcctcccaagtagctgggattacaggcacgcgccactacacccggctaattttttgtatttttagtagagacggggtttcgccatgtttgtcaggctgatctccaactcctgacctcaggcgatctgcccgcctcggtctcccaaagtgctgggattacaggagtgagccaccgcgcccggcctggaggaggattttgtcaacttcaactctaccaacattaggagctggatcattctttgctgggggggcgggggtgggcggggaaggggcgggtagctggggtgggggctgctatcctgtgcatttgtagggtgttgagcagcatccctggcctccacccactagatgccagtagtaccccctccccctcagtcgtgacacctaaaaatgtctccatgcatttccacgtgttccttgggggcagaatcctccttagttaagaaccaccagtccagttatactttaatggtttttgtttttttttttttttctttaagaaacggggtcttgctctgtcgcccaggctggagtgcagtggtgcgagcatggctcaccacagccttgaactcctgggttcaagcgatccgccccactcagcctcccaagttgcagcgattattggcgtgaaccacctcgccgggctagtatccagggctattctaagtgctaaggatccccagaccctttctaatctgaactcgctaattagagtttctaatctaaagatcccctggtgccggtcttctagaattatataggtcaccggtctcatacaaatcctccgctgtgaggagagccttcttacagcggtggggacagtgcgtaattgctaacacctgtccagggcagccctgctttctagattctacttctgatgctagacctaatgctcctgtttgcctggggtcagaacaagatacagcaactagaggccacgcccacccggcagccacgccccctcgggaagaaagcacgcccaccaagcgctaccacgccccccgcagaggccacgcccctcccgggcagcaccctggggatttgtagctgtggcgccccaggtgcccgcctctacctcggccatgcgctggtcttcctccaccggcacaaacttatcgtgcatgccgtggacaagcaggacgggcacggtgagctcggcgtggtagacctcgtcgccctcgggccagtactggccgctcatcatggcccggagtacgaaggatgacacgttgaaagcgttgccctcctttaacagctgcttctccttggctccttggcgggcgaagccggccctggtggtggtggaggcaccgctagagccccttatgccagcccgactgccgtggggtgcccccgatgccagccctagtcccagcggtacagtcccccctcccatccaactcgagcagatgcctgggttcgccagggccaggatcacggtctttggggtggggacactcacttgaggaagctccaggccaggcagggcgacaagcagtgcaggacgcaggtgggcatgttgaagattgagcagaagctgggctccagcgccgtagggcccccgccattgatcatgatcaccttgtgcactaggtctgggtactcatgtgccaggaatgtgcagaaagagacactgcccggaacgggtggggtgataggaggattgaagggaggcggtcagcaggatacaagcagtgaccattttgttttgctttgtttttgtttttgtttgagacagttttactctgtcccccaggctggaatgcagtggctccatcttggctcactgcaacctctgcctcccaggttcaagcgattctcctgcctcagtctcccgagtagctgagattgcaggcgcacaccaccacacccaggtaattttttttttttttttttttttttttgagacggagtctcgctctgtcgcccaggccggactgcggactgcagtggcgcaatctcggctcactgcaagctccgcttcccgggttcacgccattctcctgcctcagcctcccgagtagctgggactacaggcgcccgccaccgcgcccggctaattttttgtatttttagtagagatggggtttcaccatgttggtcgggctggtctcaaattcctgacctcaagtgatccatccgcctcggcctcccaaagtgctgggattacaggcctgagccactgcgcctggcctggtttgtttttgtttttgagatggagtctcattctgttgcccaggttggagtacagtgatgcaatctcagctcactgcaacctctgcctcctgggttcaactgattctccttcctcagcctcccgagtagctgggagtacaggcatgcaccaccacacctggctaatttttgtattttttagtagacacagggtttcagcatgttgctcaggctggtcgagaactcctgacctcaagtgatccacccaccttggcttcccaaagtgcggggattacaggcatgagccactgggctggcctgttttgtttttgtttttgagacaaggtttcgctgtcgcctaggctggagtggtgcggtggcgtaatcatagctccctgcagccttgacttcctgggctcaagagatcctcccacctcagccttctgaatagctgggactacaggcatgtgccaccatgctcagctaatttttaaaaatttttttataaagacagggtctccttatgttgcccaggctggtcttgaactcctgggctcaagtgatcctctggccttaacctcccaaagtgctgggattataggcgtgagccgtgacacccggcctggtgagggggttcatgtcctccccctacccagaaggcaggtccttggaagccaagattcttcccctggggtccatggacacctgaaggggtgagggatgagtgcggcctctcaaataccgtgaaagtgtgagtttgagtgttgaggatggaacttattttgaagagagaatctggatccagaagtttcaccagactttttattttaattgtttaaaatttttgtagagatgggggtctcactatgttgcccaggctggtcttgaacttctgggctcaagtgatccttccaccttggccttccaaagtgttaagattatagatatgagccactgtgcccggccctcatcagattcttcaagccaccatgacccaaaagcggtaagaattactcatcagcaagtggtaggaaagcaatctgattaaacaaatgcttccggctgcccaggggaggtcactgtttcctactatcccttccctttcaggatgttctgccacctgcctctgggcatgacatatctgtcttccttatacaagatggaaggcctgagaagcccccaaagctgagctcctcattcctacaaaagcaggggtcaacaaactatgtacggcctgtgggctagtcatttgcttttttaaatacagtttacacttttggagatttgaaaaatgtttcctaaataaggtttttttttttttttttgagatggagtcctgctctgttgcccacgctggagcacagtggcgcgatctcggctcactgcaacctccgcctcccgggttcaagtgattctcctgtctcagcctcccgagtagctgggattacaggcatctgccattatgcccggctaatttttgtatttttagtagagacggggtttcaccgtgttagtcaggctggtcttgaactcccgacctcaggtgatctgcccaccttggcctcccaaagtgctgggattagaggcgtgagccaccgtgcctggccaaaaaatgtttcctaaataaagttttatcagaagttccaacagtgactgtatggcctgcaaacctaaaatattcgctatccgatcctttaaggaaatgtttgccagcccctgctgtaatgaggaaaggatacagacaggagtcaggcagacctgattgtgtcagggacttcctgtatgcctttgggcaggttgcttcacctctctgagcttcagcctccacattcctgaagttgtaaatgtgctgacctaatagcactgttatggggtcatgggaactattgtaggtgggtgttttttttgtttttttgtttttttctcgagacagagtcttgctctgtcactcaggctggagtgcaatggtgcgatctcggctcactgcaacccccacctcatgggttcgaatgattatcctgcctcagcctcccaagtagctgggattataggcacctgcaaccatacccagctactttttgtatttttattagagacggggtttcaccattttggccaggctggtcttgaactcctgaccttgtgatccgcctgcctcggcctccaaaagttctgggattacaggtgtgaaccactgtgcccagcaggtgggtgctcatttaattagaggaatcatttctcataagcatcaacttttgagtatgttatataaagaaatataaacaaataagagctgttacctctcagtctagattcctttcttttagatacttatgtaacttctttgttttcttttcttttttttttttttttactttttagttttttgtagagatgagatcttgcttatgttgcccaggttggtcttgaactcctcagctatagcagtcctcccacctcagcttcccaaagtgttgggattataggtgtaagccaccacacctggccacttatttatttttcttttttctttttttttttttttgagatggagtctcactctgtcacccaggctggagtgcagtggcacaatctcggctcactgcaagctccacctcctgggtgcacgccattctcctgcctcagcctcctgagtagctgggactacaggcgcctgccaccatgcctggctaatttttttttgtattttttagtagagacggggtttcaccgtgttagccaggatggtcttgatctcctgacctcctgatccgcccgcctcggcctcccaaattgctgggattacaggtgtgagccaccacgcctggcctttttttcttgtctaattgcataggctagaatctctaaaacagtggtgctcaacttgcctggctgttcaatcttgcctttcttcctggataaaggagagaatgaggccacttggtagtggtcaagccctggggaccaagccttccatggaggggttcttggtaagttttaggttgtattacctgccctttaagcaggagtgaattacagtaacccatgcctttgtaaatgcctagaatttacaggattccgatgagcgcttcctgaatgcacagtgttctccagggcagttgattttttaacttagtctaaggcagtggttctcagctgggggtaattctgcccaccagggcacgcttggcaactactgaagacatttttgactgtcatgatcaacactagattgtgtagttgcatccagtgggcagaagccagggatgctactaaacatcctatagcccctcacagaaaaaaaataacctggccaaacacgatagtgctgggattgaacaacactgcttttttttttttttttttttttttgggcagagtctcactctgttgctcaggctggagtgcagtggtgtgatcttggctcactgcaacctctgcctcccaggttcaagtgattctcctgcctcacacccccgagtagctgggattacaggcacacaccatcatgcctggttaattttttgtacttttagtagagatggggtttcaccatgttggccaaactggtgttgaactcctgacctcaagtgatctgcctgctttggcttcctaaagtgctaggattacaggcgtaagccactgcacctggcctgagcaacactgctttagaacaatgtgaaacaatatcagtgatgacggaaatccctgtctgattacatatgctaatgggagttttcagcctggtatagcggctcatgcctgttaccccaccacatcgggaggccaaggagggaggatggcttgagcccaggagttcaagaccagcctgggcaacataatgagaccccccccccattctctatataatttttttttgaacttgaaaattggcctggtgcgttggctcacgcctgtaatcccagcgctttgggaggccgaggagggcgaatcacgaggtcaggagatcgagaccatcctggctaacacggtgaaaccccgtctgtactaaaaagacaaaaaattagccaggcatggtagcgggtgcctgtagtcccagctactagggaggctgaggcaggagaatggcatgaacctgggaggtggagcttgcagtgagccaggatcacgccactgcactccagcctgggggacagagtgagactccatctcaaaaaaaaaaaaaaaaaaaaaaattaaggctgagcacaatgactcacacctgtagtcctagcactttgggaggctgaggtgcaaggatcacttgagcccagtagttaaagaacatcttgggcaacatagtgagatgccatctctatttaaaagaaaaaaaaattttaaaaatgtaaaaattaaattgaaaaatgggatttttttcaaggagaaaaattaggatttttgtttgctttgttttgttttaggagataaggttttgccatgttgtccaaactcatctccaatgatccatccacaaagtgctgggattacaaatgtgcaccaccgcgcgtggtggccccttttttttttttcatgacggagtctccttctgtcgcccaggctggagtgcagtggcacaatatgatcttggctcactgcaagctccgtctcccgtgctcatgccattctcctgcctcagcctcccgagtagctgggactataggtgcccaccaccacacccagctaattttttgtatttttagtagagacagggtttcaccgtgttagccaggatggtctcaatcttctgacctcgtgatccgcccgcctcagcctcccaaagtgctgggattacaggcgtgagccaccgcgcccggatttttttttcttttttaaagagcgacaggttcttgccatgctgcccaggctggagtgcagtggtgtgatcacagttcactgcagcctcgacctcccagactcaagcaatctcctgcctcagcccttaagtaggtggaactatatgcgtgcacctcctcacctagctaatgtttgtactttttgtagagctagggggttctccctatgttgcccaggctggtctcaaactccttgcctcaagatatcctcccgccttggcccccgaaagcactgggattacaggtgtcagtggcatctcagagtctccctctgtcgcccaggctggagtgcagtgacacaatctcggctcactgcaacctccacctcctcggttcaagtgattcctctgcctcagcctcccgagtagctgggactacaggcgcgtgccaccacgtctggctaatttttgtatttttggtagagacggggtttcaccaccttggccagactgttcccgaactcccaacctcaggtgatccgcctgcctcggcctcccaaagtgctgggattacaggcgtgagccacggggctcagccaaaaactcagtattttgtgactgtagtccctgctgaccccatccctcacccccaccccacatgccagggttcacttacccgtaggaatggccaatgagcacatttcgcttcttggcatagcgcttgaagattgctcgcatgtcctcagccagcgcatagaaggtgtaggctgcggccacctggggcgcagagctggccccgtggccggccaggtcaggagccaccacctcatagcctaggcgcacaaagaagtccagctgctccttccagatggccagggaaccgccgacaccatggatgaaaaagagcaccacgtcggcctgggcgcctttgcagctagtgatgcgcttctcacagtcaatatggatggtcctcttggggcgcctggctcgccgccgccgcccaccactgccactgccgctgccgctgcctgcgctgccgggggccaagcggccatcgctgcccgccggatctgccagctccacctccagggcggccggcggctccccagagccattctgcccgtgtaggaggtcggctcgaggggctcggcccaggttttccaccagcaaccgcccattgcggtacacggtgatccggcgctgacagcggaccaagccggagaggtccccctgggctgcatccgaggatgcggatgatggtggaggtggggcagcggctggggcgggtcctgcatgcttcacccgcagcacgcggccgggcttgacctctacaaaggtgtagccatcgctggactcgacgctctccagtggccccacggcgttggggggcgtgcccagcaggcaacagaagataccgtcggtcaccccggtcagcatggtgtgtcctgtgagtgaggacagcagccagttcaggtgctgtctcaatgagaaccctgcaccgtgcagcaggcactccctgagccttgggagaactgttttagactccagtttggggagcgccagatcaagtgagccacggcactgagatttttttgtttgtgtgtgtgtgtgtgtgtgtgtgtgtgtgtgtttttgagacagtctcgctttgtcatccaggctggagggcagtggccggatttcggcttactgcaacctccccctcctgggttcaagcgattctcttgcctcagcctcctgagtagctgggattataggcaggtgccaccatgtctagctaatttttgtattttttgtagagatggggtttcaccatgttggccaggctggtcttgaactcctgacctcaaattttcctcctgcttcggcctcccaaagtgctgggattataggtgtgagccaccgtgcactgacatgttttgtctgagcagtgcctttgtggtagttaccctcctgggtcaccctagtctatcctcagagagaaagacttggctatggcttaccccacagggtgtccacagggaaggtggtggcgtcttgtgtggggatgttcctggagaaggggacattgtggcaaatgtggaccagccggaagacaccccctccccccagctggagtttataccatttatggcctcctaactcattcattcaggtatacactaactcatccattcaggtatacactaactcattcattcaggtatacactaactcactaactcatccaggtatgcactcactaactcacatatccccagggcctcctaaggcatctaaaatatgcaaatctttggtgagcccccagtgaggctcctggctctgaatttgactcctgaaaggtgaggccctaggagagggggatggggactgagccacagaaagccttgctcagctcccctagaccggggtgagccggggtctgtttcatagagggccaagctgaggcccagacactctgagaggaagctagactctgaacttcctccttggcaccctggattctggggatctgctatacaagtccccagaggtggcgaagaggatgggagaggcagggccctggctgggggcctccaagcctccatcccactccttgggccacccccgcccccgtgtccatggcaaccacaggcggttacataacctaagggggggatacccgagcagtgcacccccattgtcgaggtgtctagggcctggagatgggaccagctgcctgcctgccccctaccccaggttgggcgccgctaaggtaacgcacgcccgagactgagccgcagtggccccagacatactggaggggaagcaggccatgccccccacctcgagtggggccctaatcccggattgtggagggcaacgcacaggcgccaccccagccccgcttccccgcccccggcccccgccttccaggtgttcgtcatccctgcagcggggtcgagcccactggggctccgtggcttcctacgagcccaaacgcggggttggtggacaccactcctccgaagtggaggccccggggcttcgatctctccttttggggcccgttccccgctcacctcatcgagggccgcggggcccgggtcggggcggaggggtcccaggcggagaagccagcgtccgcctgctggcgccgtttacatggtggcgcggggtcaggccgggtgcgtctacgcgggcgggcacctgcccctggcggtcagcgcaggggcatcccgcggccgccgaaacagccggccctttaagttcctcccccgagtaggcggagccacgtgccgacgggcgggcacttcggcctatcgcagctgcggactgacctggcctagttaggagcccaatgagaggcggcaattccgtagtggaggcgggctctgggagcaacggccccgccccttttgggggttcaccgaggttgggggagggatggggcctggctcaaggcggagaagggggttgcagtctagggtctgcgggacgcctgggagtgtgcggccggggccctctctctgcaaatgggtctcccaagcccttgccccccagcccctgcctcccaattgccctgttcctctccaaacgaggcccccatactcttctctctgtattgacctttccattctagaagcagagactccaagatctttttccaatctccggtggggaaactgaggctcataaagggcacaagagcataaatcaagcaaggagcaaagctgggacttgaacccaaggctgtgtgattccaaaccctgggaaccattatttgctaacctcccccctacgccccccccttttcttttggtagggacgaggtctcgctatcttgcccagactggtctcgaactctgggcatcaagcaatcctctcgtctacggcctcccaaagggctgagatcactggcgtgagccatcgtgacgggcttctctaaagctttcaaggaaagtcttggagctgtgggtaattagagagtttgaatttcataatcagccgatttaacccatggctgccatggttctgagaagggctgatagcaagaggcaggcatcccagctctgtggtaccggcggggccatggtaggccctcaggagagctcaggtctcaaatccagcctctgccctttgctgatgtgtgacctcgggcaagttacttcactttcctgagcctccgtttatttctctatgaaattaatcctctcataagtttgctacgcaggtaaagcactcatcatagtgtcgtgcatataacaaatgctccatatattatgggcattattatagtggtgatgttttgctaaacgatgctacaggtaggatgggcttcggaggacgaggggttaaatgctccttgctgcttggccactcacatcccctggaatttgctgccagagctggattccgtccagacacctactcttgcccactaagggcacttctgggagactatacagtttattcatttagcaaacacctctctgcatgaaccccaagctggcacttgtagggatacagccccaggcccctggcccttgaggagcccttgaacttgggggagagtcaagggaaagcagtcgggccagaagaatggacagcggttgagagaagacgactccttttttttttgagaaaggatctcactccgttgcccaggctgcagtgcattggcgctatcattgctcactacagcctggatctcctgggttcagggaatcctcccacctcaccttcaagtacttgagactataggtggttgctaccatgtccccaggctggtctcaaactcctggccccaagggatcctccctcctcagcctcccaaaatgctggaattacaggcatgagccacacctcactcagcccttggagaggaaaggatttttaaagggcggataggggaacaccaggcagagaggagagtgtggctgaaatgtaagatggtgtgtgtagagggttttgcatgcctgatggaagggctgagcaggttttacctggggaaatggggagccaaggatagtgtgtgagtaggggaggggttcagatctgagtatcagaaaatttttcttccttttttttttttttttttttggttctaacaacagaggagaattcttctagggcccaaaatgggggcaagattgccaaagacaagcttgcaatccctgagtttacagattgagaaagcccagagtggcgcagggaccaccccaaggacacgcagcgagcttgaactcaggcctcctcggcttcctgccaagaggcggagacttggctgcagccaggacaagctgccagccagctgtgtgccatctgcccagctcccgctgggggcgggaagaccaaccagccgcttcctgcagctgccaccagctgcgcccggccaccgcggggcaccctctgccggtcaataggagagagaactacagctcagctgccagctgaccgcgggagataatgccttgtgcgcacgcgcttgctcagaaggcgccgttcgccggctacctgttggtgtgtatgcagagcatccctgtgccccgcggatatagactggcgcgcctctgttgcgcaggcgcagaactacaacttcagggttttccccaacggcctcttttttgcacgttaggagaaactacatttcccataatcctttgttccagggctggagcggctctgggctccggaatcgcccgcagccggtactgcgggacccactgcggatatggctgtcttggctggatccctgttgggccccacgagtaggtcggcagcgttgctgggtggcaggtaagtcctcagggggacccttccccaaatcagggaataagggcggcttcggaggctggcgccactcttcactgcccgcgtgacctgccagtgccttgcgcattttgcagccaggctctgtctccgggagccgaggctcagagaggttgagcgccaaggtcacccagcgccccgtctgacctttctcgccgtccctctacccacgcaggtggctccagccccgggcctggctggggttcccagacgcctggggcctccccaccccgcagcaggcccggggcaaggctcgcgggaatgagtatcagccgagcaacatcaaacgcaagaacaagcacggctgggtccggcgcctgagcacgccggccggcgtgcaggtcatccttcgccgaatgctcaagggccgcaagtcgctgagccattgaggatcgcgacgcagtcggcgggaccctcatggaagcatcgccctcgcctcggaccttgcctggcgctatttttgcagggagctggggagcaggaacgcctcggacctgagtgctctccatattgtggggttgaagtctggatgggagcttgccaagtccctttttaggctttttaattaggaagcatttcgaacctgcgcaacagaccaaagaacagtacaaagaacatccgtgtacccagtaccctgactaccgactacctacaacccgtccctgccccatcctgagttcttttgaagctgatctcaggcatcggattatttcttctgtaaatatttcagaatgtatctctccaagatgagagctcattaaaagacaattacaaagcttatcacatccaaaagaattatcaataattttgaaatattattaaacgtgtaataaatgttcaaagttccacttgccttatatgtgtcataactcttttttttttttgagacagtttcccttttgttgcccaggttggagtgcaatggggggatctcggctcattaaaacctccgccttgcgggttcaagcgattctcctgcctcaccctcccgagtagctgggattacaggcatgcgccaccacgcccggctaattttgtatttttagtagagatggggtttctccatgttggtcaggctggtctcgagctcccgacctcaggtgatccgccctcctctgcctcccaaagtgctgggattacaggcatgaaccactgcgctctgtcccccaggctggagtgcagtggcacgatctcggctcactgcaaactccctctcctgggttcaagcaatctcctgcctcagcctcccgaatagctgggattataggcgcccaccaccacacccggctaatttttgtatttttagtagagacggggtttcaaccatgttggccaggctggtctcgaactcctgacctcaggtgatctgcctgcctcggcctcccaaagtgctgggattacaggtgtgagccgtcatgcccagcctgtgtcataaattttataggtctgggaagactggtggaaaactgtgtgtgtgtgcgggggggtgtttgtttttgaaacagggtctcgctctgtcacccaggctggagtgcagttgtcggatccctgcttactgcaacctctgcctcctgggttcaagcaattctggtgcctcagcctcccaagtagctgggattacaggtgcatgccaccacgcccagctaatttatgtatttttagtagaggggagtttcaccatgttgaccaggctggtcttgaactccagcccataaggagtttgaatcttccacttgtcccttggggatgtttgattttgagcaagaatttaacactgtgaggtgcatttgtcgcctataaaatgcagtgctggtttctcctctgctctgttgctgttggagtaataatacttagtagcttccacttagcaacttcactgtgcaattgctgtgtgctgggtgcccattctttgccctggaagtcaggaaggcagtttggacacagaggtgtcagggctgggagggggattgtgagggctgtaggacttcagggaaggtacctgacttgcctttttgaagaatgcagtcagggaagtcttggaggaaatggcaaggtctgggagagcccagacatagaaggaattggttagaggtgaggacacaggtgggcaatgaagaccgcaggtgcccataaatggggccaaggaggtgggattgaatactagggagttacgggaggtggttgagcaagacggtgtcgaggaggagctagggagtgttatggttcttatcttctagggctgctttaaaaacgtaataaacacaagaagatgccggcacgatggctcccagaactttgggaagccaagtctggaggattgcttgaggccagaagttcgagaccagcttgggaaacatagcaagacccctgtgtcttttttttttttttcttttgagagggagtttagctcttgttgcccagactggactgtagtggcttaatctcggctgactgacacctccgccttctggttttaagcgattctcctgcctcagcctcttgagtagctgggatgacaggcgcccgccaccacgcccggctaatttttgtattttagtagagatggggtttcaccatgttggccaggctggtctcaaactcctgacctcgtgatccgcccgcctcggcttcccaaagtgctgggattgctgggattacaggcgtgagccaccgtgccccgcctttttttttttgagacagagtctccctctgtccgccaggctggagtgcagtggcgcgatctcagctcactgcaagatccgcctcactcacggttcacgccgttgtcctgcttcggcctccggagtagctgggactacaggcgtccgccaccacgcccggctaattttttgtatttttagtagagacgtggtttcaccgtgttagccaggacggtctcgatctcctgacctcgtgatccacccgcgtcggcctcccaaagtgctgggattacaggcgtgagccactgcgcccggctggctttttttttttttttttgagactgattttcgctcttgttgcccaggctggagtgcaatggcacgatcttggctcactgcaacctccgcctcccgggttcaagtgattctcctgcctcagcctccctactagctggaattacaggcgcagagatggggtttcaccatgctggccaggctggtctcgaactgctgacctcaggcgatctacccgcctcggcctcccaaagtgctaagattacaggagtgagccaccgcacccggccgaacctcgcatcttaaaaacacacagacacacaaaagctctagagagcctcgcggagctgtaaactacagctcccaagagacttcgcggccgaggcctccgcccacttccggatctcactttcattgcttccaagtaccgggaggtgctttgcttcttcaaccgaacttgaccacaatgggaggaggcgtggcaaccaatgggcgcatgagttagctggatgcggccaatggaagcgtgcaaagcgctcctatgtgggggcggggctagactgcacaccaatgacagggaggtggtggcgccatcagtgtgggctgtgccgtggctggaagttactgtgaggcggcggctaagaaggcggctctggtggcggcggtggaggctgaggcggcggccgaggcggcgacggaggaaacagaagatggtgaggatggcctccaggcccccactccccctctgctagacaaaatggcgctgtggtcccacccacctctagtatccccctaggcccctctccgttctgcccggtcccctcaggtccggcccgcccctcccactcacctgtgaccttcgacccccggaccctaccgagagcttcctgctgatcccactgccactccttctccgacccctgaccccatccaggataccaagccctgacaactcattcatttccgggttgcggctccccccggaaatcgtctggggtggggatggggtcccgtaagaccccctggtctggcctcgttctcagcacgccggacctggatctcttcagttcaggagaatttgggaggccggcctgggccccggggcgggggagggggcttggcaccgcgatatgcagggctttgtcgccaaaggaagtgcgacatcgccgattgtcccggttccccgggccctgaccccacctccaccattctgggcccttacccgcctctaagaatgaaaaacttttatctccgatccgcatggattgtccctgtgaaatgagggtagcagtagtctgaacctcttagggtggtgacaatttaggtaactgacgtcgtaaaggactcaggatagtgaatgctcaacagatgagctgggtgactcgaggccagtgacgttctcttctagctgtcccctcattatgaagtgtggatcgtccccacctggctgttggaaggttgaaattccttcagggttcctcagtcatcctggaatttgggtctggtggttcttcggggttcagtctccccacctgaaaagtgggatggtgacccaccctcagagtggaactaaagcctctccacaacccccattagttggcatcctgagggctgggaagggtgatgggaagcttggtcaagatacctcaagtctcctttgtcccctgacccagagtcccagcccacaatccacagtccttgggatgtggtggggatgaaaggaagactccctttcaggaaggaaatgggaaggtgggttcctagtgtgcgggtccccaagcctgggagttgtccttgataccttggtacagtctcatccctacagccaatcataagtggattagattgtctctgccttctgaacacacctgaattcatccatggcttcatgccctgttgcaggtactgccacttcccacctgcatacctgtcccagcttcttccctggtctcctagccttgctctcacccctttggcagttcataattcacctgaaccagaaggaactttttttttggagtcagggtctcactctggcgcccagactggaggctcaagagatccccacaccaggctcatttttgtactttttggagagatggggattccctatgttgcccaggctggtctcaaactcctgggctcaagtgatcctgcctcagcctcccaaagtgctggtattacaggtgtgaggcactgcatggggcctgagaaggaggttgttttttttttttcttttgagatggagtcttgctctgtcgcccaggctggagtgcagtggcatgatctcggctcactggaacctccgcctcctgggttcaagccattctcctgcctcagcctcccaagtaggtgggacccaccaccatgcccggctaatttttgtatttctagtagagacaggttttcaccatattggccaggctggtcttgaactcctgaccttgtgatccacccgcttcggactcccaaagtgctgggagtacaggtgtgagccactgcgcccggccagaaggagcttttaaagatgtgcatcaaatgataccactttctagcctataaaatgctccaggaaccctggcggctcccctcctcaccctgaggcccctggccacctctatgaccttatctccactctcttctccactctgtctgtgagcttcagccaccctggccttgttttcacttcctcacactccaggttcctgctaccccagggcctttacacctgctgctctttctgctcggaacactcttcctcctgtgatcgaggtcattcctgactttggggggcccccagttctctgctattagtgtactgcttctctttctcatctctttgttgggtctctggcaggctacctgcagtgggactggcacacaggtgtccagtgcgtgtctgctgaggcacctgtgagggcccagccgtggctggcatttgtctggaatgaggcctcccccaccccctgcccccatgtctcgaggccttgttttccagcttagcatgacaggaaggctgcacgtaccctgccttcattcatttgtccaacgcagacatgttgatcctaaaggctgcccctgagggagctctgtgcaaagcattccccttgttgtcttatgactcagagtaaccctgggaggtggccctgttggaatgcgtctcttcacagggaggcccagaggctgggaagtccctcgtcccaggtcacacaaccagggacgggctaagccaggattgagagcagaatgcccggagtacctgcacctctcgccactcagccaccgggccctgtgtgagcccggccagggttcagtcagccctgtcctgtcctcttcccttggggaggtaccagtccagccagggaggtggacatgtaagcagatgacctcgccggggtgtgagggaggctctgggagaggctcccgaagtgtcgggggaacaaaggggccagggagggtgttggagctggtggggaggttagcaggtatttgccacatggaggcatgaggggcattcctagagggtgtgtgtggcagagggtgtgtatgatgggagtccagcaggggcaagctgggccagggctgcgaagggggacagggacccctcctcacccttcaggtctcagtgcctgcatccctgcgtctgggcagccctcctttatcccctaaatgggccagagctctgccttgcacctcacactgcgccctcgaggcaccctgtcctgcagccgcttcctgtgcactgtgcagctctttgccccacaccatctcaaggccaggcgcgtggccatggtggctcagtccagtgccctggtgcctgctagggccccagaagaccttgctgaatgaatgaagctggccccagagccgggtgctgagctgaggctggcatcctagggtgggaggggaggcaggtttgagggactttgaacaggtcctggggcagtaggtcatccagatgtgacggctgcctcccgggtgggagggggaggcccacccagccacattccggcttcccgagagggaccagcagaggaggggccagatgtcatagaattggggacactgctgttcctgcctgtcccagagggtggtgggaaattgtctgaatagcagcttctcccagggcagctctcttgggcctcaggcatcaggggatggccttcccttccagctctgtagcctgcaggggctctggcttttgcttttcaggtgtgtgatgaagagaaggagcttggcttctgaggtggggtacatgtgggttcaaatcagccccctggttttctgactgagactgggtaacctctctgcctcggtgtccttgcctttgatagggagacactacctcctgccccattgggtcaggagatcatacatagtgagctcaggagggccccgttcagggcaagccatgtggagagactcgcagcagacagtcccaccactggcccactccagacctcactcacagggttggattgaaaatggctttttttttttttttttttttttttttgagacagagtctggttccgtctcccaggctggagtgtagtagcacaatcatggctcactgcaacctctgcctcccgagttcaagcgattctccagcctcagcctcccgagtagctgggatcataggcgcgcaccaccacgcccacctaatttttatatttttagtagagatgaggttttgccatgttggccaggctggtctcaaactcctgaccgcagatgatgcgcccgcctcggcctcccaaagtgctgggattcaggcgggagccactgcggtatgacttttaaccagtggcctgttctcttgcagcctcaatttccccacctctcacctaattagggggctgtcatgaggatcccgtgggggatgtgcacatagcctggcctggttacttttctgtggtcccgacagtgtatccagcagccagctcaagggtgtgttctggaaaacttgaactacaaagaatagtgggaagaaggaacccagcagtcaccctgcaggtgctccagggatgagctggcccttgcctgttttctcatgtaccatcttccatgtcttctaggcagattttttgaaaggactgcctgtctacaacaaaagcaattttagtcgatttcacgcggactccgtgtgcaaagcctcggtgagtgcgtgttcctgggactgggaggaattggtcacttccagggggcctgggggcagcttgtgtcccccgattggggtcttggctggaacagaggctgatcttcaagcccagccccatccacatacttgagtgtcttccaatctgcactgaagggtgggtgctgagtggagggatgaggagaccccaggcccatgcactctcctaacccaccccttctcaaccctcctgcagaaccgacggccctcagtctacctgcctacccgcgagtacccgtctgaacagagtaagtggccgctgtcagtctgtcccattctggctgctgaggggcggggtttggtgactgcagcgtggcacgcggaggttatcttcaaccccggcccaggccatagacttggcttgggttcacacgctgtctactgaatccagttaagtcagggagggcctccagggaggtacaggagggggaccttgggggcttcagcctggggatgcacacgtggatgcctgtccactcccagcccctggggacagccagaaacctggctttccccaggtgtctcttgattgggacacactgggatccacagccagcccaaaggggcccccaagttgtccctcatctgccactcactggtcctttcccctccctgtcagatgaggtcaagcgagaactctggttctaagacaagtgctatcgggcagagaggcagcagagggctacaggggcttgggctggggatccagccaagcctgggtggcagtgatgggaagggggtccaggcaaaggggcccacagcacaggaggacttggtcttgctgtcttagtttaactgttcaaaaagactccacaccaggtggggtagctcccgcctgtaatcccagcactttgggaggctgaggcaggaggattgcttgaggccaggagttcgagaccagcctgagcaacatagttagaccctgtttcaccaaaaaccatatatatacgtatatatacacacatatatatacacacacgtatatatacacacatatatatacacacacgtatatatacacacgtgtatatacacacacgtgtatacacacacgtgtatacacacgtgtatatacacacacgtgtatacacacacacgtgtatatacacacacgtgtatatacacacacgtgtatatacacacactatatatatacacacgtgtatatatatacacgctatatatatacacacgtatatatatacacgctatatatatacgctatatatatacacacgtatatatatacacactatatatatacatacgtgtgtgtgtgtgtgtgtgcatatatatatatatatatatatatattagccgggcgtggtggcatgcatctatagtcccaggtgggaaaatcagttgagcccaggagctccaggctgcagtgagctatgattattccagcctgggtgacaagagtgagaccctgctcttaaagcatttatccatctggagcctgtggggtgggactgtgtggtcactgggcacagatatgcggtatgtgctcctagtcagcctgggagaaacataggcatgagagtctcagttgcggggcttggtcccccaccaagggtggaatcccttgcagggagccgggaccctgaaagcagctggctcaggcctctgggagtagctgcgagtgtgctcagaagcaaaaacatgggacttttggagatctctggagttgggggtactgagttccagccccaaaaagacctcccagggcagtgtcaggggaggagcctggggaggggaggcgtctgcgactttctctatctttcctccttagtcatcgtgacagaaaagacaaacatcctcctgcgctacctgcatcagcaatgggacaaaaaggtgaggcccacagggctctggtgcagggattgtgggtggacagagactgggcacctggcaggggcttctgagcacaggaaggactctagtgattggagcagggccttgagggctgggtaggagtgccctgggcgatccaggagagggaagagcgttccagtggagggaaccgctgtgcagaggccacaggacaccagtgctcaggaggctggaggccaggcccaagtagccgccaggcccagttttccatggctctggcattaggtagactgtattggtatgaactagatagaatattttctgaggccgagtgtggtgacgcatgcctgtagtcccagcgctttgggaggctgaggcgggcggatcacgaggtcaggagatcgagaccatcgtggccaacatggggaaatcccgtctctactaaaaatacaaaaattagctgggcgtggtggcacgtgactgtaatcccagctacttgggaggctgaggcaggagaatcgcttgaaccagggaggcggaggttgcagtgagccgagattgcaccactgcactccagccttgttgacagagcaagactgtctcaagaaaataaaaaaaggccgggtgaggtggctcacgcctgtaatcccagcactttgggaggccaaggtgggcagatcatgaggtcaggagatcgagaccatcctggctaacatagtaaaaccctgtctctactaaaaaatacaaaaaaaaattagccaggtatgctggtgggcgcctgtagtcccagcttcttgggaggctgaggcaggagaatggtgtgaacctgggaggcggagcttgcagtgagcctagatagggccactgcattccagcctgggcaacagagcgagactccatctcaaaaaaaacaaaaaaaacaaaaaatcttttctgaatggtgaaatgtgtacacatgattaaaaatctcagctgggcgtggtggctcacacctgtaatccccgcgctttgggaggcctacgcaggcggatcacgaggtcagaagtttgagaccagcctggccagcatggtgaaaccccatctctactaataatacaaaaattagctgggcatggtggcgcacgcctgtaatcccagctactccggaggctgaggcagaagaatggcttgaacctgggaggcagagattgcagtgagccaagatcatgccactgcactgcagcctgggcggtctcaagaaaaaaagaaatctataccgggcgcggtggctcatgcctgtaatctcaggactttgggaggccgagtcaggcagaccatgaggtcaggagatcgagaccatcctggctaacacggtgaaaccccgtctctactaaaaatacaaaaaattagccgcgtagctgggtgtggcggcgggtgcctgtagtcccagctacttgggaggctgaggcgggagaatggtgtgaacccaggaggtggagcttgcagtgagctgaaattgcaccactgcactccagcctgggcgacagagctagactccatctcaaaaaaagaaaaaaagaaatctaggtaacatgtgagggtgtggctgggtgtggtgattcacacccggaactgcctgagaggctgacgcaagcagatggcttgaggccaggagtttgagaccagtctaggcaacacagcaaaactccatcactaaaaaaaaaaaaaaaaaaaacaaattagctggctgtggcatgttcctgtaatcccagctattcaggaggctgaggtgggaggatcgcttgagcccaggaggttgaggctgcagtgaatcatgatcatgccattgcactccagcctgggcaacagaaccagactctgtctctagaaaataaaaataagagggtgtagttgcagcgaagagtcatctcccgcctcccgcttctggtgccccagctcccttcccagaggctgcctctgcacacgggatatttttcttctttttctttttcgtttttcattttcttttgccctgccctgccctgcccttcccctcttttcccctttttttccccctttttcctttcctagatgaggtcttgctctgtcacccaggctggagtcgcccaggctggagtgcagtggcgtgatctcggctcactgtaacctcctcctcccagtctccacctcccaggttcaagcaattctcctgcctcagactcctgagtaggtgggattacaggcacgcgccaccatgcccagctaatttattttattttatttatttatttttttgagatggaggtttgctcttgttgcccagactggcgtgcagtggcgcgatcttggctcactgtaatctccgcctcctgggttcaagcgattctcctgcctcagcctcccgagtagctgggattacaggcatgtgccaccatgcctgattaattttgtatttttagtagaggcggggtttctcgatgttagtctgacttgtcttgaactcccgacctcaggtgatccacccgccttggcctcccaaaatgctgggattacaggtgtgagccaccatgcctggcctaatttttgtatttttagtagagacagggtttctccatgttggccaggctagtctcgaactcctgacttgaagtgatccacccacctcggcctcccaaagtgctgggattacaggtgtgagccaccgcgcctggccttctttttttttttggagacggagtctctctgttgcccaggctggagtgagtgcagtggcgtgatctcagctcactgcaacctccgcctcttgggttcaagcaattcttctgcctcagcctccagagtagctgggattacaggcatgagccaccgcgcctggcaagtttgttttttttttttttacctaacattgaacagtgggtggctgcctaccctgcgcaaagttggaaggtcgggggactgtgtggcaaagtgactgcttctgaaaatccaagctgctgggcccacccccaccccttctcctgccccccaggacttggtttccacagcggggaaggaggcgtgtgcttctgtcttgcgttgatgtgcggcatccccagtggcttccaaaggccctttattcccaggctgggtgggttgctcctctgagtgcttgagaaaccagccctgtgtgggtcattgcatgtggtgggggtgactccgggtgccaggaaacacctgtctatcaccaggcatgggtccagaaagtgctctgggcagggcttagtggggcaggtcctggtggtaggaggggctgcctagccagggaccctggggccccccactgtactccaggcctacctctgtgatgctgctgcaggggcctgggctggcattatgactctgggagcttcacccacgtgaagactcacagcctccagctgggcaacatagtgaaacccccatgtctaccaaaagtaaaaatattaagcgtggtggtatgtgcctgtagtcctagctactccagaggctgagctgggaggattgcttgagcccagaaggttgaggctgtccgaaaaaaaagactcacagcccctctcttttccctgtcccccagaacgctgccaagaagagagaccaggagcaagtggagctggaaggcgagagctccgcacctccccgcaaggtggcgcggaccgacagcccagacatgcacgaggacacttaagactctcaactccacaggcgcctcctgccaggtctgctcctcggtcgcccacccgcctgcccgccatgtgtaagcaccccgcccgcccgcctccctgccggcccatccacaccctgcgtccacaccacttccaacctcataggagccgatgtatttattttccttgagtttttatttatgctgtaacctgtatcaagcgttggttaaaggggacatcagacccagtagtgtgatgttggtagatgctttttaaaaaaaacaacattgtccccccgacccccgccttccatcgggccagttccccgattcctgcccccagttctccagagaaccagagtgtgtctgtgagagtctctagcgggggctttactgtggccgggcgacaggggcgggcccggggtggcctgacctaccaggacagccgagtggccttctcccccccaacaccggtccaggccattgagactcggtcttgtcccacgcttcgcccggaactttcccatgcccaggcctcactcagcgtgcacgcacgttggggagaagtcggcccttgggatctttctcttgagtcattttatttttatcatggactagtgcgtgctccgtgtccaccccaataaaagggtctttcctacttgacctcgcgtctttgctccacacaccttggctgcagaggacggagcccctgggagtcatccctgttgtcaccaagaggagtgagaagggccccccacgccaggggccccaggaccggctggattctctcgtgggcttgctgaggccaccatgttcaaggccaagacctgcctggaccatcccctctgcctctcctgtcaaggtgaccccaaggacaggtcattcctgagagacggtccatggtgccaaggatggagcggggtcagccccctgcctgggataccgccaagcagggcagcgcacctgtcagacaccgcagagatggccggcctcatccgggggcctggggtctctggcctctgctgctcccctgaggcatggtgacagtacagacggcatctggccggtcttgctgtcctaggtggtggcctcacccttgctgggtcatagaggagctgtacagaaggttggcacctggcagttggcatgtgccatggccgctcatggggacccctcttccgccagctgggctgggtttggggctgagcttgggtatgtaggggtgttcgggctctgggcagaaggtttgtggccctgaccactgagcctggggctgggggaacaccgcttctccccttattgcccccactggtggtggtggggatctcagttttcttttgttttgttttgtttgtttgtttgagttggggtcttgtactctttcccaggctggagtgcagtggcgtaatcacagctcactgcagcctcgacctcaagccttcctcccacctcagccttccaagccgctgggaccacaggcacccaccaccatgcctggctaatttttttttttttttgagatggagtctcgctgtgtctcccaggctggagtgcagtggcaagatctcagctcactacaacctctgcctcccaggttcaagtgattctcctacctcagcctcctgagtagctgggattacacgcgtgcgcccctacacccagctaatttttctatttttagtggagacggcgttttgtcatgttggccaggctggtctcgaactcctgacctcaggtgcttcgcctgcctcggcctcccaaagtgctgtgaccgcacctggctgcctggctaatattttaaaaattttttgtagagacagggtttcaccatgttgcccaggctggtctcaaactcctgggctcaagtcatccaccttcctcagcctcccaaagtgctggggttacagacgtgaaccaccgtgcctggcagaggtctctgttttgagagctgagtctgagggcgttgggatggtgtagggttgggccacagagctagcagacactccgggctatggagggtccgcctgccccagattccactgtggagggccctgcctgtgtcagaccctcgggcctaggcggcccatctctcccaaggacggagagtgccagggtgggctcccgtcctacacaaggagtggctgaccaggcccaggcacagcacagccaccctgctgtacctcccagctcccggcagtgtctacaccacagtgatggtgctacaggggccatgtggtcacaggacaggtggtcaggaaatgcacacttgactgcggtcgatggtgccgggtccggctgaatgccctggaggctcccaggccagctggggagtcccagtccccagggttggtgtgacctgggcaggcctgcggtgtccatctgtgaatgactgagatggtgggacttcagcttccaaggccaggggccagagtgggagcagggggcactcccgcctttcccctcggcctgtctagacctctctggctcccagtttctgctttgagtggctgggggctgtctcctgcctgtgctgtctgcccgtcgctctgcagggctgctgggcgggcacctccttcccctcccctacctcagctccctcctttggggtctgagggctgtgccccagcttgcctccctgtggcctccccctagaacccctgggtctgtcgggacatgccccacctggcacacacaccctgtgtagctcccactgcctgtgggaggacgctgggcccctgagccggcctctgtctacccctcctgcctttggggtcccctttaccccactgttcccccaaactgccttccaccttctccgcctttgcacaggctgttctcctgcctccagtgaactctgacttctccacagcctcccaaagggccccttgctcacactggcccagccctgcagcatggccatgttggtctctgagccttaagcctttggatgtggacacatttgtcctcttcctgaaaaatgtgagggtctgagaggccacgttcctgttcctgagtcatacgacagagtcccagtgacttgggtctgatgtctgtcccacagtgggacatccctgctgcatcccaatgccaccccgtgtcctggggacacccaaatgtgccattctctcagtatcacaagtcggggactgcaggaggctcaggtgccaggtgccttctgatgttcatgccacaagctcttcccactgtctctggctccccagacgatgttccaggaggcgggtgtgccagaaggggccacgtcttgcaaaccaccgcgctgtcctctttgagaaggagtcttactcaggactggggcctgtgcacacattgtcgcctcttttcagcacttagagattccttcctttgtctagtggctgaagccagggctgaagttggcctccaaatctgggccgtctcagaggcggcgcagcctggagttttccatctgtggccaagacccagtttttgggaggaggccctcatgggtcaagccagcctgtaccaggatggggggagggggttcccaacctaggccccagccacccagactcccccacccccactcccttttccactgctctgacctcgggcactgttgaaatatagtttttattgcatttctgccgttttacaaaaatatgacaaaataaattaaaaacaaataaataatcgcctgttctgtgtgtgtgtgtgtgtgtgtgtgtgtgtgtgttttctgttggatttgtgggtttcctttcgtttggaaaggaaaacggcagatggggggcaccgaccaatactgggggccctcgggggctgaagcgcattttgcattttggagaccggccgcccctgtgaatgactgatattgcatatgagaagagaaggcagggcgggtagagctaatgccagccgctgggccagcacacggcctgggggctggggctggggctaggggagggcgctggggtctcgaggggatccgaggtgggcggtagcggtgggggcgggaggctgtaaaagctggcgtctcccggcaggggctggggggcgggtgggggcccggccatggcacagggtgggcactcggcagcggccagggcctggcggggggcggcaccctcgcccccgcagccccagggcccgtcccactgccagcagcctgcgggcggtgtcgggggccggggcagcggcattggcggcggcggcgcggggctccggctgcggcgggtgcggagggcaggggcgcccacgggggccagcgctgtccctgcggaggcgagaggggccgttccggggggatgccgcccccgccggaccccgccgggctggcaaccctgcccgcgctccctcccgggcatccaggcacataaaggccttattgcttctgatcagagactgaggtggggcggccccctgggcggcttccggtgcataccctgcctctgggcacggccctgccggtcacagggggaggacagtttgaggaagtccctctggcttctgacctatggcccttgtgctgcagctgccacctgttgggctccctgggaatggggttgctggagcccaggctgggattggggcaggggaggtggtgggggtgggagggtaggggtgaggcctgcacctctgctcagcacatgtgggagctccctgggtgggcagccccagccccacctcgaggaaggccttcctgaacagctgggctgcagggtgtggatttgcatagaggcctggggggtcaagtcccccccaagagtgagctggagcaggagaagggtgggctggttgggaaacaggcctccctcatctctcctggcaccggagcatggtgggggtccctgggtgcagtcctgggacaaggggctttggcatccctccctggggagggtcaggcacggggctccaggctaacaaaggccctggagatactaagcaggctttaactgagaggctccacgtaccactgacccaggtccccaccaggacctaagaccgggcttcccctgtccccttcagcccctctccccaggcctggccaccctaccctatccccaaagccggcccggcgtccccacccccgagttaaagcttgtgacctgagccttcctcttcgggccggggggcttccagctcctcagccagggcctcgtccaccggcccactcctctgaacccggctgctgccactgctgggggtcccatctggccgggcctgcccgcccgccccgttggacccaggctcagcccgggtgccaccaaaggggaagagcttgccagcatggaaggctttgggcggtgagtggctgcgctcagagtcccgccgggtctcgggtgacttgaggaacttgaagctgaggaaggcaggcaggcgggtgtcgctgcctgtgggtgactgggcagggggaggccgggtggtggctccggcccctgcagcagccagtgaggatgtggcccctgacgagaggaatttgccctgcagtgggatgatctgcttcaacttcatgacgttgttgggtgccagcagggaccctgggcgcttgggccgttcaggcccgtggccacccgcagtgctgcccttggccttggcagaggccttctcggaggaggtggcagggtccagcccagagccctcggccctcgcctcctctcggccaccagaatcatgctcccgccgggcatggtgctctgcatggcgctgtcgctcctcctcctcccgccgcctgcgctgctgctgctggtagcgatgctgggcctggcgctcgtgtctctgcaggtagagccaagccgttacaggactaagaagaaagggtgttagcgggtgccagctgaggctggtgcatgccagggctctctgcaaaagtgggggagacttaaatgcttattaggctccaactgtatccctgcacccacaatgggggctccctgcagaagtgggagagagccaatcacttattgggtgcaaacggcattcccagatacatgatcagcctctctgtggaaatgagggaggcttaaatgcttattggggctgggcgcagtggcttgcgcctgtaatcccagcactttgggaggctgagatgggaggatcacttgaggccaggagttcgagaccagcctggacaaaatggcaaaaccctgtctctaccaaaaatataaaaattagctgagcatggtggcacacgcctgtaattccagctactcggaaggctgaggcaggagaatcgcttgaacccgggagacggaggttgcagtgagctgagattgtgccattgcactccagcctggggacaaagcgagactgtctcaaaaaagagaaaaagaaaaaaagcgtattgggcgccagcttcatctctgggcccacactgaggttctctggggaactggagagagattccgaggcttattgggtgcaactgaatgaatccctggacccacgccggtactttctgggaattgaaaagaaaacaaacattcactggccatcaactctgtccccggctgtgtgccagacagcgtcttaggaattggtaaagtggaaaccaatcctgagcctcaaccgatcccctgcttcccagagaacaggcaagagacagaaccgtggctgcaggctgggtacggtggctcacgcctataatcccagcactttgggaggtgggcagattgcttgaggttaggagttggagaccagcctggccaacatggtgaaaccccatctctattaaaaatagaaaaattagccaggcgtggtgggacatgcctgtaatcccagctatttgggaggcatgagaattgcttaaacctgggaggtggagattgcggtgagccgagattgtgccactgcactccatgcactccagcctggatgacagagtgagagagattctgtctcaaagaaaaaacaaaaacaaaaacaaaaaggactatggctgcagcagactatacccaggtagccacgcgaggctctgttcaataaaataaaaattcagtttctcggtcgcagcagctgcacttcaacgtgctcacttatcacctgtagctaaaggctgcagggacagtgcagacaaaggacattgtcatcctcgaggaatgttccctgtgcaggcactggggagctccttggcccattctgtagctttctgaggaatgcggaagaagctgcgcttctaggaagcctccgctgtgtccctggccccctaacaggatgcaatcgggcaagctggtggatggctgaaggttctgaagggccagcctcgtgctggatgctgccaggattccagaagcgactggacccgttgtgaacactagttattattgcttattattactctttttagagacagggtcttgctccatcacccaggctggagtgcagtggcgcaatcatagctagctgcagcctcaaactcctgggctcaagcgatcctcccactttggcctcccaaagcgctgggatcataggagtgagccactgcacccagccagggagcactaattattatacccagctctgtgcagtctctgcatttgcccttacgctaaggaattggccaccaagatcagagatccaccagcagccccaccaatgagaaaaccgagcccagcctggcccccctaccttaaaggcctcgcggcgctggtactccagcttggccatttcctcggccacccagcccgggatatcggggatggccacgtggatgaggtacttgaggagcagagcgaagtgctgcaggggtggcagagaggaggctgcaggctgcagacgctggggccgccctctcgcctcccagctgcccccgcccctgtcgccggccccacctcgagcactaccaccgacacgatggctgcctccgggctcagccaggggaagaggcgctgcagctgcccgcactggccgattaagtagcagttgaccacaatcgctaggacacccatggcctccatcaccttctgcagggcggcaggagggctcaggcggggtccagccggcctccccagaccccaggctcctcccagctgcacctgggctccctctgggcctcagctcggatctcttggcttccccccacctgccactggccgatgctttccacgcgctggccgaagggccgctgcagcccggtgcacagcttgaaggcgtcgctgcggatctcaatgaggttgttgaccagggcgcacagcgccgccagggggaaggcggacgagaagagcacaacgtagccgaactgcacgaacatctcctggtagtcctggaacgtgtcctgcgagtgggcgggcctcagacctggaagcctcttccctgggacaatctttctcccattgagcccgcctccctcagattatcccatgtggacccagggcctgtccccatcctcagccagcccagaggcttcctgtatctggctaggccttcctctcctgcagcatcccaacatcaatggccctgttatcaccactcccacccccacggccttcaccctcggacggtgtgtcccgtccccggcgaggccccgccccctgcgaggccccgccccctcctcacctcgtacttcttcatacagctctccagctctgcctgggtgagctggggcgagtgttcctcctccggcgggtcaatccaagacgaccggttctgccgtctctgcctacgggtcgaatcgctgttggagccgggttccgggtccgggcccccgtcgggcccctggtctcggccctcgcccccggcccggcggaacaagatggccgggggctcccgttcagggctgccgggagccccctccgcctcgtcgtcctcctcggccagggtgaacactcccggctccagccccttctccaccatagtggggctcccttcctccaggagggcctccgggcttgggccgggccgacgccgccccgcgccgcgctcagcgaagctgaccttcttcagccggagcccgcagtccaggaggcccccttcctcgccctcctcctcgtcctcctcttcctcctcgtcctcctcctcctcgtcgtcctcgtcctcctccttgccccctggaggcccgtccccctcctccccgccttcccccgcccgccgccgctccaccagcgccgcctcctcctcctcctccggcgccccgcagcccccgctgaggcacctgcggcccccgcccccgctgccgccgcccccgccctcatccgcctggggttcgaggcggcggggcgcagggcgccggaggctcaggaggccaagcagggctcgggccagctcccagacggcccgcaggcccagctcgccgcggcccaggcgccggtacaggtgcggctgcaggacctcgcgcacgttctggaggaactggcgggtgatcagcagcgtggccagcatctgggggcaggaaggggaaggagagaggcgcgtggggggcaagcggggcgccgggatcgggggactcaccctccctgggcgccccgccggagcaccgtgcccagacacacgccgaatccggttcctaactccgctgctttggacgcgcctcgacgcgaggcccccagcgctcagccacaaaatacagcctggcacgcgcagcgctcctcgcccacctcacgggcaggcccagcgcgtctccaccccaccgcgggctctgtcggtgcactgggccgcgtgcgcccccagccgcctgcacctgcttgctggccgcccccgaccccagattccctccgcgcatgcgccctcagctcggcgcgccaggcccccagcacagccacgctgcccaccccggcgaggacccacgggctcgccacctgcccgtactttggcccgggccgcgagcaggaggccccggagggagaggaggagcaggcggaaccgcagggccgcgagcgggaccagcaccgcctgcagctgccgctcgaggctctgggacagggacaggacgagcaggagctgtgaagggaccgacggacagatggacggacagatggggggacgacaggcagagagaggacgcacagacgacggacaacggacggacagacaggagagaaggatggaggaggggagggaggggctggagagcccttggaccccttgtgccgggtctggcccctcgctggccgccatgggggcaggggggactgccgctggggcgggggtctcacctctttcaagcgctccatgtccttgaggtagaaaccgatgtagaagaggctcaggtacgagttgacaaactggaactgcaggaaggaggcaggcggtggtcatcctgcacccccacccgactccttggagccttccttgtgccccatacagacggcacagcttccccgttgtccccctgcctgtccgatggtggtgactcaccaggacaactttgatgatgaggtgcttctcataggcgctctccagccggtaattttctaggggccaagggggggagtgagggggcagccgcggtccccccaagggtggcagggatcccaaggggcagtggagaccttcctcccagagaccccctggcaggtcgtacccatgtcattgagccagatggctagcttcttgtagccctcggcactcacactgacaagcagggccagcatgaccttaggcaggaatcgggcgagacggggcaaccccttcacgctcagcaccagctcctgcgggagaagggggttcagggctcatcccagctgcagggctcagcccaaggtggagctaggtaccaaggacagggcgggtgagggtatggggggtcacctgcagctggaagcagccaagcatgagcaagaagacacagacgaggcacgccaggcacagggggaggctcacaagcagctggaagagcagccgcttccagggcgggtagtagaactcctcggcccgcgtgatggggctgatacgtcgcacgccctgatggtgggcaaagaccgggcccagcatgagctcagaggggccacctctgccttctgcacccctccctatcctcagaactcaatttccctccatcatgcggaggtgaccctctcaggtcacccacctagggcactgttcccagtccctcaaatccaacttccacctctccccctggggagcacacagagcccgcctcggtttggcataccctctttgatgaaacaatcctgtttcacacctctctgcctttgctcctgcagtgccccccaccatttacctttgtcctgtctccatgaccctggactcagcccccaactgaccctgaactgggggcgtggctcctccacggcttccccaggtgagtccagcgtcccccacttatatgccagctcagcccctctccgcttccattcctctaggaacagcgtcgaccagatcacgttgaagagggcaaagaccacgcaggaaacatcccggcttgtctgtgagtggcagagaagagttgagtcattgtttgtgccagtccagaaaggagggcgcctctggatcccccagaccttgcagggtccctgcccagtacctgatcagcctctgtgaatgtgtacaggacagacccgaagacagctgggtataccatagccgacgtgtagaagcccagccaggcgaagtacatggcaattttcacaccaaagtaatcacagatgtcatctgccaggggacaagtgggtctcagtcaccccctgcctgtctgctgggactccctcccaccccccagcccaggcagcacctagaggctggttttcacacacggcctgcacccatgacttcatgaggcggttcagaatacgctgctcgtggacagggaacacctgctggatgatcccacgtgctgccagctccgggactgtggagggaggagcacaggtgatccccgcccctccacctgtgcctagcctggctagcccctctttgtctgaaacccaagtcacagctttttgcctgctcttaaacctctagagctctttccaggggagaagttctagacggatagaagatctgattctccttcagaaattgtaggtgcaggggcaggcggggagaatgtaaaggaactgggagagtggggttctggtgaggaaccatgtttttttttttttttgagacagtctcactctgtcgcccaggctggagtgcagtggcgtgatctccgctcaccgcaaccttcaagcgattatcgtgcctcagcctccggagtagctgggattataggcgcccaccaccacgcccagctaatttttgtattttagtagagacggggtttcgccatgttggccaggctggtctcaaactcctgacctcaagtgatccacctgcctcggcctctcaaagtgctgagattacaggtgtgagccaccgcgcccggctttttttttttttttttttttttagacggggtctagctgtgtcaccaggctggagtgcagtagtgcgatctcagctcactgcaacctctgcctcccgggttcaagcgattctcctgcctcagcctcccgagtagctgggactacaggcgcgcgccaaccacacttggctaatttttgtatttttagtagagatgggggtttcaccatgttggccaggatggtctcgatctcctgacctcgtgatacgcccgcctcagcctcccaaagtgctgagattacaggcgtcagccaccgcgcccggccttattttttactttatttatttatttgtttgagacagggtctcgctctgtcacccaggctggacagaatgcagtggcgctaccatggctcactgcaacctcgaactcctgggctcaagtgatgctaccgcctggacctcccaaagtactgggagccactgcgcctgttcccctgctttaaataaagctcagtttgtggacccgaacgtctgaggaatggtaaaaacttgctgtcggaaggtgaacttgggtgcctagtttcctggaggggaatccaacgcccagagccgcaccactctgtaagtggagtgctgtccatggttcctgcctccactttatcccaaacccagaaaagggcctctcctggacccacctcccagaaataagccccaccctttggccaaagcctcgccccctcagctcattggttcccaaccctttgccaacccctaactggttggacataagccctgacctcctgtcctgataagctgtcctctcagagctccacccaactcaggagataagctccacccttttgctaaggccacacccctttagctcattggtttcctaactctttgccaacccctgactggttggatctgggccccgccctcctgctcctataagctgtctttgaagagctccacccaactctctgcctgtgattggtgttgaccccgccctgctcactgattggctggtcctccaggaagcgcacgttgtggagtgcttctccctgcttggcacgcaaattctgcagccagaagcggatgatgctctggcgttcctgcgaggaagagggcgtgagctcagggaactcataggcacaggatgcatgcgggggcccagagccggcctcacctgggaggtgaagaagcgtagctcgctctccacattctcatagataaagtcctcctcgcaggagaagccgcgggtgcccccgccaaactcggccttcactgctttgcgcagacccagctcgtcggcccctcggagtaggctgtgaagaaggcggaggaggtgggctcacagggaggccccggcccaccatcctggagctgaggatggtgcacctggcagcctttgggacaaacgcagggcggctggatagcatggttggcacttggtagagcggggagtcgggtggcaggctcagcgagaggccagggacaggggactcgcctctcatacgtggcggtgacaaagaaggcgtaggcacgcgtgtggcggtggtggcggacttgcacgatgagctcgggaatgcccacgcggatgtggttcagcagccatagcagcgtgtggtcatcggtcgtgtctgccaaggggcacagggaccgatggctcctgccacgagggggcccaaggcctcctacgtattcccgttctgggaagccgagctcaggagagccgcatctgggcactgggcgggcgggcgggcgggcttgggtacctgggaaggtcatcagcacgtcgcagttctctgtaggcaccgtcttcatccacgccttgtgggacaccaggtagcgaccagcctgcaggagccgctttccgaaaagcttatctagggggcggcgtagcaggcccgggtcaggccactctgggatccggacccggcctccagtcttggctcctcctgcccccgccagggctcctcaccactccacctggcattcaaggccccgggagctctgggcttggcttattttcctccctccacgtccttgtaccagccaggccttcctccagaaatgcccttccccccagatcctcccttacaaatcttactcattcttgaggcccagctccgcctccaaaaccacaatcgatggggcgctcactagcagccctgagcgcttcaccacattatgacagcgccgtccttgcagcagccccagggactaggtgcggttcttacccccatttcacaggtgaggaaactgaggcccagagcgtttaagtcacgcgcccaaggtcacacagtcaagctgggatttgaacccaggaccgtatgattctgtattcttcgcggagaggctctctcaagcacatccctggcccgccgcgatcccgcagcccgggggtggcagggcgcagcccaagcctggggctctcggaggggcgtgtccgcgtctccgcgccgggaccccagcccgaagcaccgtcccagccccgcccgccgggccgcagccgcagtgccgggaggagccggcccctcgtccagacaccacgccaggttacgtttgaccctgatcctcctccccgtgtagttgacgcgggctccccaggcacctgcaaccctgtctggtccagccgccgcacacatacccagaactccggacgccggggctgcaggctcgccctccggcgggggcctcttgccacgctcgccctccagggacgtgcccccggcgccggaggcggcctcggccatggcgaggacaggtcaggtcaggggctacggacggcccgggcgacggggagccgcgggctcatggggccggtgcagccgcggagcgcgcgggaggaggagacaaaggccgcgcccgcccgcgccggcctcggtcctcgctcgcccgagcgctgcttctcgtccccgcccgagccgaacctcgattctccttcccggcccgatgcacgtcactctagggttctcagctgagttcgcccgcctagttctttggttcgcgtctccgcccgtgttgttttctgggtttccttctcgcccgcctacctcgctccctgctgctggtccccgcccgcactgatggtgcattctccaacttgtccccacccatgctttcttctggtccccgcctcggagcctcagtttccccatctgcaaactccggaccctggagacgctgtttggaatgtgagatgggcgtaagttgactaagggaggacgtgggaggggcgggccggttggggaagattcctggtgacaataacttcaaccaccccagtagggctgtgatacataattacagcaagccctgcttaggaactttgcacgcaccatttggctgcctagaacactcctcatgcactcttcgtccggttaacaccgactcccttcaggatgtaacctcggagaggatcccatagagttgtcaagtttagcaaataaaaatacagtccgtctagttaaatgtaaatttcagataaaagaataaatgttagctgggcggggcgcacctgtaatcccagctacttgggaggctgaggcaggagaatcgcttgtgctcaggaggtcaaggctgcagtgagctgagatcacacccactgcactgcatcctgggcgacagaacgagaccctgtctcaaatacatatatatacatacatacataaatgtttctatgtcctatgtctacatgggacatactagtactaaaaaattattcattgtttatttgaaattcacatttagctgggcgacctgggttttacctggcatttggccaacccctgactattctgagtagctcagtctgttagactgaaagcccagcgagggtaggaacgaggggccaggtctggttctcaatgcgagcacacagtaggcgcttgctgtacgcttgttacagatgtaacaactagcttgttacagatgtaataactagcttgttacagatgtaacaactagagaatggcagatgaaatataaatatgtcatcatttgttcctattttacaacttaaaatattaaagcctcggccgggcgcagtggctcacgcctgtaatcccagcattttgggaggccaaggcgggtagatcacctgaggcaaggagttcgagaccagcctgaccaacatggccaaaccctgtctctattaaaaatacaaaaaattagccaggcatggtggcgcacgcctgtagtcccagctacttgggagtctgaggcaggagaatcgcttgaacctgggaggcggaggttgcagtgagtctagatcgcgccactgaactccagcctgggcgacagagcgagaccccgtctcaaaaaaaaaaaaaaaaaaaaaaaaaagcttgggcaacgtagtgagatccccgtctccaccaaaaaaacgaaaacaaaacaaacaaacaaaaacaacaaacaaaaagaaacaccgaaaagttagactggcatggtggctcgcgcctgtggttccagctactcaggaggctgaggcgggcggatcccttgagcccaaaagttggaggttgcaagagccgtgatcgcgccactgcactccagcctgggcgacagagtgagaccctgtctcaaaaataaaataaaataaaataataaagtaaataaaaatattgagcagggcgaggtaagggggtattagaactctattctgtcagacagatttttcttaacacgcaagtgcgccgcccgcccgctctgatccagaaccagagaatccgccatgcgaaggcgctcccggagaccccgcccagccagtgcctggaattccaccatcagcgctttattccgagtttcagtgctgtcctgggttaacctgaaagcaatctccgaggctcccctttctggctttcggggagccagagactgaccggacacttggctctgcaggtgcagacctggaccagagagacagagagccaaggaagtccacagtggagagagggctgtgctgggggttccaggaagacttcctggaggaggggatcttggagctaggccttgaagacgagtttgtcaaatgaggaagggcatccgaagccgagggaacggcagaagggaacgctggggaggggagagaatctggagagttccggaaaaagcaagtaggactctttccagaagttcgggcaagattttccctggatcagggcgtgggttctccagtactcgtccctcccggtcaccgagatgctctgagtttccggtctgaacctgaacgtaaagaggtgtagtccctcctttcttgaacgggaaaactgaacgcacataggtccttgccacgcctaaggctgcggagtgagcagatggaaaatgcgggactcaaaacctcccctcgctgtaatttgcactgccctgtgccaaactctgtcctttcttccattccttattcctattgtcagcctcgctgcgctaggaccctaaaaatttggtctcatgttgcccggggaacaacatttcgctacacctacctccataccgcctcccgctcccgctctcccttgcaccagccaatggaagcgagtatcttcagacggtgggcaggacgtatcctaagatacccaatggtggtcgagaatagttgagcactttactagtcaagccgcggagtgggcggggccccctgcccagacttgaagccacacaggcaggtcgggcaggcgggtcgcaggttgtaaatccatgtggcgggggctttggaccctggcggcccaagcggcacgtgggcctcgcaggtggggctacaggggaaggggtgcgacagcttggggtgctgcttggaccccagacccactccctgggttttaggggcccaattccctgcggcagagcaatcattcgcgttcttccgtgcctcaatcgttcatgacccttgcggcagagcccatatctgggtctccttctggcctcacagtccctaatccggtcacccttcggccttcagaacatccaatttgtgcatcccccagccgcagaacccccccacctggagcatctcgcgatcatcgagccctcggtctacttgacactgaggctgagcctcccaggtgcgctgattcgcctcccctccggttccagattgtgcacgcgccggagcagcggcgcaccagcccccggctccggcgccaccatcttcgcgctaagctctggccaaggccgctgcggcatcgcagtgatccggaccagcggccccgccagcggccacgccctccgaattctcacagcaccccgagacctgccccttgctcgccacgccagcctgcgcctgctcagcgatccccgctccggggagcctctggaccgcgcactggtgctctggttcccaggtgagggtccccaggttccgagcctcctgtaggtcccatgactcagtttcccccttccaagggtttgcactggctgtgctgtcctcctgtcacctgtctgtcacattaggtccccagagtttcaccggtgaggactgcgtggagttccacgtgcatggaggcccggcagtggtgagcggcgtcctgcaggccttgggtgagttgcagcgttgggtgagatgcttggtcctcccaatgggcctgggtggggaccagggggtgtcagactgggaccttcctgcaggcagcgtgccagggcttcgaccggcggaggcaggcgagttcaccagacgggcgttcgccaatgggaagctgaacctgaccgaagtggaggggctggcggaccttatccacgcggaaacagaggcgcagcggcggcaggccctcaggcagctggacggagagctgggccacctctgccgtggctgggccgagaccctcaccaaagcaagtcccccatttgtccattctctccctcagagaccccatctgtgcaacccctgcatgagaccccctctcaatcccgcattcattccctgcgtgaaagcttccggcctatgagccgccattctggcccctgaagtcgggctggacaaattgggtgtgggaaggtgggtttctgggtgcacacaccacctctgctctccctgccccgccaggctctggcccacgtggaggcctatatcgatttcggcgaggatgacaacctggaggagggggtcctggagcaaggtgggtctacctggtggtgggggaggaagacacctcatatcagccctcaaaggctcccctcactgtctctctctgcctgccttctctcacccacagccgacatcgaagtacgggcactgcaggtggccctgggtgcacatctacgagatgccaggcgcgggcagaggctccgctcaggggtgcacgtagtggtcactggaccccccaatgcgggcaagagcagcctagtgaacctgctcagtgagtaggcggcgggaagggggcggggcctagtgccaggggcggggccaagagctgggttattgagttagttgttcaggtctaaagctccctccagacatggggtagaacctgggggaggagctcccttgtctccaccctctcctcttcttctgaccctcccccaggtcggaagcctgtgtccatcgtgtccccggagccagggaccacccgtgacgtgctggagaccccagtcgacctggccggatttcctgtgctgctgagcgacacggctgggttgcgggagggcgtggggcccgtggagcaggagggcgtgcggcgcgcccgggagaggtgggcggacagggtggtgatgggaggggaacgcggggccctttctctgccttttctccctgttgcgtttatttttcattcttcctgaatcagagaacctgctaagccctatcaagcatggatctcagggatttggttctttttttttttttttttttttactccgagaccgagtcttgctctgtcgcccaggctggagtgcagtggcggtatctcagctcactgcaagctctgtcttccgggttcaagcaagtctcctgcctcagcctcccaagtagctgggattacaggcgggagcgaccacgccgaactattttttttttttttttgtatttttagtagagatgaggtttcactatgttggccaggttggtctctaactcctgagcctcggcctcccaaagtgttgtgagcccaccgcacctggcctggtgttttgtttttgtttttgagacggagtttcgctcttgttgcccaggctggagtgtgcagtggtacaatctcggctcactgcaacctccgcctctcgggttcaagtgattcttctgcctgggcctcccgagtagctgggattagaggcgcccaccacaatgccaggctaattttttgtatttttagtagagatgggggtttcaccatgttggccaggctggtctcgaactcctgatctcaggtgacccgcctgcctcggcctcccaaagtgctgggattacaggcgttagccactgtgcccggccagtgatttagttctgattaagtcctgcccccggccctccggacatgtttctcatccctaagccctccgcccagccctcacgttctgccccgccctctcgtgctctgtcccgccctggcactccgctctgccccttgcggtctatcccatcccctgtgctctgtccaccccctacattctgccccacccctggtgctctctaccccttaccctgtggtgtgtctggtccttcttgctctgccccgccactcatggtcgccccactccagtgctgtacccggccccttttgctctgtcccagcccctgtgctgtgccctgtccctcttgctctgctcttccccctgcacagtgctctgcccctcttgctctgccccgccctcctgtgctgtgccccgcccctcctgccctgccctactcactgcactgtgcccagcccctcctgctctgccccgctcccgcaccgtgaccgctcctcttgctctgcccttccccctgcactgtgccccgcccctcttgctctgccccaccccctgtgctcggcttgggcccccaacattctgccggtcccctggtactctactcctccctcccgacctcacgcttcgcagctcccccagtgctctgcctggcccctctaactgtccctccacccagtgccttcaattgctcaacctgggatccccgctcagttgaccttgctcccgcaggctagagcaggctgacctcattctggccatgctggatgcttctgacctggcctctccctccagttgcaacttcctggccaccgtcgtagcctctgtgggagcccagagccccagtgacagcagccagcgcctcctcctggtgctgaacaagtcggacctgctgtccccggagggcccaggtcccggtcctgacctgcccccgcacctgctgctgtcctgtctgacgggagaggggctggacggcctcctggaggcgctgaggaaggagctagctgcagtgtgagccccctcccactcccagcctcccctgacccacagtttaagtgtgggtccctcaacttcaatttctgaacctacaaaatgggtacaaccatttccccttcaagggatggttgtaaaaggtcgggagagaccatgtctcttgtctcttccaggtgtggggacccgtccacagatcccccgctgctgacccgagcaaggcaccagcaccacctccagggttgcctggatgccctcggccactacaagcagtcaaaagacctggccctggcggcagaggcgctgcgggtggcccggggtcacctgacccggctcacaggtggagggggtaccgaggagatcctggacatcatcttccaggacttctgtgtgggcaagtgacgggatccagggaagtcgcacccaagctgcgtggagacccaggagcctcgggggatctggaaacagtttaggccaattgggattctcattcgcctgggaaagaacttgattctcaaatagtgaagcaacacagctgagaggtagtgagatccctgcagggactccctggagattcaggccctggaatggggctgaatggaggtcccgttcgacccttgatgctggggcatccgggttgggatggagataggaggatctcagtatatttgtttcgtagttttttatttattttgcaaataccaaaggaatgtaaaaaaaactcaggtgatctagaagtgtttattttcttcccttcccttcccttccctttccttttccctttccctttccccttccccttccccttccccttcccctacccttccctcctctgtctattgcccaggctggagtgcagtggtgcgaccttggctcactgcaacctccatctccggggctcaagcgcttctcctgcctcagcctcctgagtagctgggattacaggcatgtgccagcatgcccggctaatttttttctttttttgagacagagtctcgctctgtcacccaggctggagttcagtggtgcgacctcggcttactgcaacctccacctcccgggttcaagtgattctcctgcctcagcctcttgagtagctgggactacaggcgcacaccaccacgccaggctaatttttgtatttttagtagagacaaggtttcaccatgttgaccaggctggtcttgaactccttgacctcaggtaatctgcctaccttggcctcccaaagtgctgggatcacaggcgtgagctatcacacctggccccagaagtgtttcaacatggaaattttccttagcccttctgtggttgtcatggcttaatgtgtgtctttccagaactttgaatgtttgcatacttgtggatgtacctttcaaatatgtttgtcttgtgtatcatatataaatggtattgtgttcattgctctacaaattgtcatttctttttaaaaaaaaaacagaattatggagatggggggtctcactatgttgcccaggctggtcttgagctcttggactcaagccatcctgctgtcttggcctcccaaagtgctgggattacaggtgtgagccacggtgcctggcctcattccttttttagtctttagtcttctttttttttttttttttttttgatggggtttcactgtgttagccaggctggtcttgatctcctgaccttgtgatctgcccacctgtggcctcccaaagtgtgtgtgtgtgtgtgtgtgtgtgtgtgtgtgtgtgtgtgtgtgtgacagagtcttgctctgttgcccagactgaagtgcagtggtgtgatctcagctcactgcagcctctgcctcctgagctcaagccattctcgtgcctcagcctcccgagcagctgggatcataggtgtaccctaccacacctggctaacttttgtatttttagtagagatgggtatttgtcatgttgcccaggctggtctcaagctcctggcctcaaaagatctgcccgtcttgtcctcccaaagtgctggggttacaggcgtgagccaccacacccacctttttttttttttttttttttttagatggagtctcactctgttgcccggcctggagtgcagtggcgcaatctcggctcactgcaagctccgcctcccgggttcatgctattctcctgcctcagcctctgaatagctgggactacaggcgcccgccaccatgcctggctaattttttgtatttttagtagagacagggtttcaccgtgttagccaggatagtcttgagaccctgaccttgcactaccatatcccatgtctggctaatttcttattttttatagagatggggtctccctatattgcccaggctggccttgaactcgtggactcaagcgatcctcccaccccagcctcccaaactgctgagattacaggtgtgagccaccacaccaggacaacctcttgtatcttaaaaatgactggcaaggccgggcgcagtggctcatgctgataatcccagcactttgggaggccataggtgggcggatcacgaggtcaggagatcgagaccagcctggctaacacggtgaaaccccatctctactaaaaatacaaaaaattagctgggcatggtggcatgcgcctatagtcccagctatcgggaggctgagtcaggagaattgcttgaacccgggaagcagaggttgcagtgagccgagaccgtgccactgcactccagcctgggcgacagagggagagtccgactccgtctcaaaacaaataaacaaacaaacaaaaatctgactggcaaaacctaggggtctttctccctctataagctgaatctttattcattcattcattcactcactccgtgaatattcatcaaactcctgcatccagcattgtacacatcattttattgaatcttcaccacagcacgatgttgtggctattttcttccagttttgcagatgagaaaactgaggctcacaggaatagttacttcctggagtttccccagctttggggtttgaacacaggtctgtttgactccaaatctgagtttgctgagggcctcctgtgcagcaggcaggatgttggggtcacagaggggagcaacaggcttggtccctgttcacattaaagaagtgacaagaggccaggcgtggtggctcacgcctgtaatcccaacaattttggaagccaaggtgggcagatcacttgaggcctggagtttgagaccagcctggccaacgtggtgaaaccccatctctacaaaaaatacaaacattagccaagcatggtggcacacgtctgtggtcccagtaactcaggagggtgagacaagagagttgcttgaacctgggaggcagaggttgcagtgagcagagatcacgccactgcactccagcctgggcgatagagcgagactctgtctcgaaacaacaacgaaaagaagagacaagaaagaggtcattacagtgaggcctgatggctgctctttttttttttgagatagagtctttgctcttttgcccagggtggagtggcatgatctcagctcactggcaacctctgcctcccaggttcaagcgactctcctgcctcagcctcccgagtagctgggactataggcgtgtgccaccacgcctggctaatttttgtatttttagtagagacgggtttcaccatgttggccaggctggtctcaaatgcctgggattacaggcgtgagccaccgtgcccagccttttttttttttttctttaagtaaagatgggggtcttgctgtgttgcccaggctggtctcaaactcttggcctctggtgatcctgagacctcagcctcccaaagtgctgggatcacatgtgtgagccaccgtgcctggcctgatggcttctttgaagctcataaagaggagaagtgacctagtcaggcaacttaaagtgggctgcctggcagaggtgatgagtgttgagatctgaatggtgaggatgtcagatggaggagtctggggagggcaccccaggcagagggcactgaatatgcaaatcccttcatatgcatatcccactgacacatatttcactggattacatatcccactgattcaggaacttcgcggtgtgttcaaggaatagtgagatggtcaggtttttttgttggtttgtttgctttttttttttttttttttttgagacagggtcttgctctgtcgcccaggctggagtgcggtggcgtgattgtggctcactgcaacctccgccttccaggttcaagcaattctcctgcctcagcctcccaagtagctgggattacaggcatgtgccaccacgcccgaccttttttttttttttttttttttttgacaaggcctctccctttcacccaggctggactgcagtggctcgatcatggctcactgtagcttccatcttctgggctcaagtgatcctcccacctcagcctcctgaatagctaggactacaggcatgcgccaccacgcccagctaatttttaaatttcttttagagatgggttctcactatgttgcccaagctggttttaagcttttgggctcaggcaatcttcctgccttggcttcccaaggtgctgggattacaggtgtgagctactatgcctggccctttttttgggggggggttggggtggggtctcactctgtcacccaggctggaatgcagtggtacaatcatggctcactgtaatcttcaacctcctgggctcagttgatccttccacctcggcctcctgaatagctaggaccacaaccaccatgcccggctaatttttaaatttttttcatggagacaggatcttgctatgttgcccaggttggtctcaaactcctgacctcaagtgatctgtccgcctcagcctcccaaagtgttgggattacaggcgagagccaccgcgcccggccagaggtggtcagagtggctggagcagaggaaaggaggagaaagaggagggagaccattggagaagggatggatggaggggtctgataggcagaggttcgtctgagattcttcggggagcctgacgtggcggggaccgaccagcagagggcgcgtcgcgctaagtgaggcggtccccagcaatcctcccatcagcgctcccggtgccccaccctcagcggatctaggccttccgcattcacctggtggcatgtgaatggttaacttcccctgactggggtggaaactgagtctcgaagagaatcaggatcttttctggaatcagaaaaagatctccacctccagtggttgaatatacaaactctgatttcagtggacacagagcctgggaggcatccgcggcagagagagggcacgaaaagggcctaaggaggcccgcagagtttctgaccacccaactgaaggagacctcagggccgggcgcggtggctcacgcctgtaatcccagcactttgggaggccaaggtgggtggatcacctgaggtcaggagaccagcctggccaacgtagtgaaaccccgtctctactaaaaatacaaaaattagccgggcgtgctggtgcatatctgtaatcctagctattcgggaggctgaggcaggagaatcatttgaacctgggaggcggaggttgcagtgagccaagatggcgccactacactctagcctgggaaacagagtgagactccatctcacattaaaaaaaaaaaaaaaagaaaaagatctccacctccagtggttgaagatagaaactctctggtttcaggggacacagagcctgggagacatcccgggcagacagagggcatgacaagggccaaaggaggccaccagagtttcccaaccacccaactagaggagacccaggcctgattttatttacagggttcctggcagtatgtcactatttgttcatttccttgcttgttcaaccaaatcaacaaattggggctggaggggcggtggccagagtggaaagggtcacaccatgagctgagtccacagatgttactattggccccatcaggaaaccaaaccgatgcccagagaagaaaagcaataatgtagatctgggcgtgaggggtgggcttgaagtggggagggtcctgaaggctcccaggaggggtgagctgggcctgtgcctgggtgggattggagatgctctttggacaggatgctggggccccgcctgccttccctggggccctggcacacagctggcctgaggtccttggctacaatcctttttttccaagaagggtgaggtggtttgtgggaagcagccatgggggttatttatagaggctgcaggaaatccccaaagagtctgagactcgccaggcggttggacctcagggtcaggaagggggcctgatcggccaattgctcgacccccaccccctgtattcagcccccacccggttcctgaggagtcaccagcctgggacagtcagagctttagggtcagagctggaaagagggagggatgaggctgggagagaggtttccaaaaggggaagcaagggctatatctgggacttcaagaaaggctgcctggaggagggggtctctggagctgggcttcagaggtagaagggttcgttagacatgaaaaagactttctaatccaagggcacagcacaaattaatgaatgttgagtcttttacaaagaattaaaaagtccaggataggaggaggcaaaaggggagtcacagatgtgctaaggagttagactttgttctaagggtaatagggagccatggagagtgtgtgagcaggagagggacttggacagagtctgtaatggaaagactcctctggaccagcacaggagccataccagaggcagcagctgaggtgcaagtgtacaggggctgagccagggccaggtcactgggatcggttagagggatgatggctcctggaatgctctggaaggcaaaacagacaaaggaccagaggcctgtgcccatgtgtctggagagtttagaattattactattattattttagagacagggtcttgctctgtcgccccggctggagtacagtggtgcaatcctagctcactgcagcctccaactcctggactcaagtgattctcctgcctcagccccccaggtagctgggactaaaggtacgcaccaccatgcccagctaatttttaaatttttgctagacatagggtcttgctaaatttctcaggctggtctcaaactcctggactcaagcgatcctcctatctcgatcccccaaagcgctgagataatagccatgagccaccgtgcccagccctaatacaactttatttataaaaacaatgcctgaccttagagttattattattacacccaatgcttggatgagaaaatggaggctaggattgactgagccaagattcaaacccagggatgtttggctctgaaatcctaaatcaggtcttctgggatggttaggactggctggcatcaatgtctccccctaaggactctgggctgtctggcagtaggcttaggggcagggatgtccccgcttccttggggcctccagctcagcccgtctgggcggtctggccaggctgacccccctactctgtcttggcagagccccagctgagcgcttcctgcggtgaccatctctcgcccttgtttccgtatcccggaaatatcgttcctttgtccctccagactagcctgccctaagcgtggcgctgccagctcccaggtccttgtgactcatccgtcccagtccaggaccccaggggatgggctgggagggaattgagggattgagaggatgggaggtgttgggggaggagacaagctgagatcctagccagtgatttctttctttctttctttctttctttctttctttctttctctctctctctctctctctctctctctctctctctctctctctctctctctctctctctctctctctttctttctttctttcttttttttgagatgcagtctcgctctgtcgcccaggctggagtgcagtggcgcgatctcggctcactgcaacctctgcctcttgggttcaagcgattctcctgcttcagcctcctaagtagctgggactacaggcatgcaccatcacgcctggccaatttttttgtatttttagcagagatgggatttcaccacgttggtcagactggtctcgaactcctgatctcaaatgatctgcccgcctcagcctcccgaagtgctgggattacaggcatgagcaaccatgcccggccctagacagcgattttaaggctgtttttcctgatggccattggctttatgtcctgaagtttttacttgttagagataaagccccagggatggggttacagagtcaaagttttgtgcattcattcatttgagacagggtcttgctctgtcacccaagttgatgcatagtggtggaatcagagcccactgcagccttcagctcctgagctcaagcaattctcccacctcagcctcccaagtagctggcactacaagaacgcaccatcacacctggttttctttaaattttttgtagagacgaggtctcgctatgttgcccaggctgacctcgaattctggcgctcaagcgatcctcctacctagggctctcaaagtgctgagattacaggaatgtgccattgcacccagcctgattttattacgtttcactaaactagtttctggaagggctattacaggacttgaatttctaccagtcttgtaggaaaaggaccttttttctacacctttacttgcagtaggtgttgggtgttatgaccttgaaaagacattttcccagtctgctgggtgcaatgtgatttccctgtgttctttcgatttgcttttccctgactactggctaatttagtgatagcagtgagccaaagtgtctttaaactggacactggtaccttttctggagaattctttgcaaacctagaactttctttctcttttttctttctttttttttttttttttttgagacagggtcttgctttgttgcccaggctggagtgcggtggcgtgatctcggctcactgcaacctccgcctcctagggttcaagaggtcctcgtgcctcagcctcccgagtagctgggattacagacgcacaccactacgcctggctttgtgtttttttgtagagatggggttttgccatgttggccaagttggtcttaaactcctggcctcaggtgatccactcacctcagcctcccaaagtgctgggattatagggactacaggcgtgtgccaccatgcctggctaatttttaaaatcttttgtaaagacaagttctcactatattgccacaactggtcttgaaatcctgggctcaagcaattctctcacctctgcctccagattagctgggtccacaggtgcacatcaccatgcttggataatttttaaggtttttgtagagacagtgtcttgctatgttgcccaggctgttcttgaactcctgagctcaagcgatcctccagcctcagcctcccaaaatgctgggattacagatgtgagacatctttcttggcctgctgtttaaaggaaacactaaatttaacagcattgccgtcatgatgctgtgccttgtagccactgcattaaaccctctttggctatgactctgctatttccctttgtgtatagagatgcctgtgccttgggggctgctggtgtcccccaacgtttgttccaggttgaagggtcttgtggcctggaggagttggggaggaggttccctggctttcatcttctttccagtcttttctccttcatagccatgtggtacttttgttgttgttgttgttgttgtgttgtgttttgttttgttttttgctctgttgcccaggctagggtgcagtggctcgatcttggctcactgcagcctccacctcccgggttcaagagattctcctccttcagcctcccgagtagctgggattacaggcgtgcatcaccacgcccagctaatttttgtattttaagtagagatgtggtttcaccatgttggctaggctggtctcgaactcctgacctcaagtgatcctcccgccttggcctcccaaagtgttgggattacaggcgtgagccagcatgcccagaaaccatgtggtacctttaaaagcagaaatcacgcttctggagtctttgaaggatttactaatatttattaagtgccaccaacatttcaacgggccacaggcagggctgggagttgggggagaaggagtggctcccctcccgacaacaggtgaccctcacccccggctcagggccccgagggggtcctggaaacactcacgctcaaggagcggaggtgaatggcttcctgttctcacctccgggtccaggcactgggggtgaggaagtggctgggaggccaggaggctggaggaggggaggtgctggggcccagggctgtgcgggaggggatgggatcctgtgggtaccttggcccgtgtgccagggtcgggggaacgtgacactaggtgagaattgggtagaaagtgtgtgtgaaagggcatgcgtgcatgtgatgttggtgccatatctataggtgtcgttgtcatggtgtgtgttgtcactgtgtctgtgtgtgacatcatcaccgtctgtgtgatgccatcgccgcgtctgtgtgacattaatatgtgtgacgtcgacatggcccgtgacgtcgttgctgcatctcggtgtgacgtcatgccaagttccccatgtctgtgtgcgacgtgctgcatctgcacgacgccatcgctatatctcttcgtgacgtctacatggccacgtgacgccatcaccacggtgatatgtgacgtcagcgccgttgcttgcgtgacgtcatctccgcggccgtgtgctctgggtgagggatcgtgaggcgcgggtgcgggtgtgagagggtactaggggtttgcatgcagggagttgtctgatggtggccctgggtggttgggggcggcgggagggggttgtgtcgggcgctgtgagcatatccctgcatcctccgcaaaccgccgagtcgggccatcccttggtcctcaggcctggagcctcctcagccactagggcaggaaggggatggtaacacaacagagtgtcagacagagggaagggcaaacctcgccgggccctggaggctcgtcctcagcggggacacaacatcctggggaccccggccctgcctcctaccaccctgggcccctacttcttcctcagaaccccagggctccttcgggttcagcctctccatgagacgctcatgtgttgaacctccccaggatggtgaatggtgagactgaggtgtgttcttccccattatacagatgaagagactgagattcagagtggccacacttcacgagccccaagcctctgctacagcttgtttgactctccccagtgcctcccaacattctggggatactgagaatttaccccaaagcctctgctcccccagacccctacactggttcccaaggcaaggcttcggtctccctcttttgcctgctcctgctcacatgtcctccatggctccccagtgccctcaggagaaagtccaaaccttacaacgtggcattcagggctccacccctctgcccctgccaggcctccccatcagggactcctgctgtgccaaagacccaacaattccaagagccatcacactgcttccgcaccctccggccccaccgcctttgcacgatcggagttgtcttgctatctgggatgccctccccctcctgggcctggcagaggttcctgcgaggggtcaggggttggcttagagcctgtttcctgctgggggaggagggggctgtggctaagtcccgcttccgctggtcctctcccttccttccccggctcttccctggggcccgagtggcctcacgttccttggttggctctgggccctggccctggccccagactccatcctcaaccagcatttacccagctcttgtccctgctgccagcctgcaaggctccatctttgcttgaactgggtcaatgcacatccctctgtcctggtccccagctctttgtcccgtagtctgttccccaacagtgaccagaggaacttgtggatgcttgaactgggtcatgcacatcccccgtctgctcaggtcctcacagcagccacaggcagggcttgatcagctcccatcacttccctgccctcacctcctcctcccgttcccctccatcactccactccagccacaccggcctcttccctcaaacacacaaggcacggtcccaccttggggcctttgccctggctgtgtcctctgtctggtgcacccttcctgggatccccccatggctcctccctcacctcctctgggtctctgcttcaatatcacctcctcggtgtagcctgccctgtctctggtagaaagttccaaccttcttacgcttcctgcccctttctctgtctcgcccatcaccaaaggacccttgagtgacccgttcatctaatttattatccatctctcccactagactgtgagccccatgagggcagcgggtttctgtgccttgttcccagcacccagcaccatgcccggttaccagcagctgctcaataaatacggctcgaatggacacacgaatcatcagaggcgttaacagtgaacttgaacaacattaaccacgtgtccagctcagagccagggctggactcccatcttaagcccatacggccgggcgcggtggctcatgcctgtaatcccagcactttgggaggccgaggtggagggatcatttgaggctaggagttcaaaaccagcctggccaatgtggtgaaaactcatttctactataaatacaaaagttagccgggcctggtgatgcatgtctgtaatcccagctacttgggaggctgaggcatgagaattgcttgaacccaggaggtgggagttgcagtgagccaagatcacaccactgcactgcagcctgggcaacacagcaagactctctcaaaaaataaaaaagattaagaaaataatgccaggcgcagtggctcatacctgtaatcctagcactttgggagacggaggtgggcggatcacctgaggtcaggagtttaagaccagcctggccaacatggcgaaacgccgtctctactaaaaatacaaaaattagccgggtgtggtggtgcatgcctttaatcccagctactcgggaggctgaagtaggagaatcacttgaacctgggaggcagaggttacagtgagccgagatggcaccattgcactccagcctggaaaacagagcgagactctgtctcaaaaaaaaaaaaaaaaaaagggccgggcgctgtgactcacacctgtaatcccagcactttgggaggccgaggcaggcggatcacgagatgaggagatcgagaccatcctggctaacacagtgaaaccccgcctctactaaaaatacaaaaaattaaccgggcgtggtggtggccacctgtagtcccagctactcaggaggctgaggcaggagaatggcgtgaacccgggaggcagagcttgcagtgagccgagatcgtgccactgcactccagcctgggtgacagagcaagactccgtctcaaaaaaaaaaaaaaattaaaattaaaaataaaaataaaatcttggccaggtgtggtggcccagcctgtaatcctcgcactttaggaggctgaggcgggcagatcacctgagatcaggagttcaagaccagcctagtaaacatggtgaaacgccatctctactaaaaatacaaaaaaaatcacccaggctggtggcgggcacctgtaatcccagctactcgggaggctgaggcaggagaattgcttgaacctgggaggtggaggttgcagtgagctgagatcacaccagtgtactccagcgtgggtggcagagtgagactccatctcaaaataataataataataataataataataataataataaaataaataataaaatcttttttaaaaaaagctcttcccattgcaatttttgccatattcagccacatagctcctggaccaagatttacttaatatttgccatttaaaaaacgttttagaggcagggtcttcctctgtcacccaggttggagtgcagtggcgtgatcatagctcactgcagccttgaactcctcggctcaagcagtcctcctgcctcagcctcccaagtagctgggactacaggtgcatgccatcatgcctggttaatttttttttttttttttgagacagtgtctcgctctgtagcccaggctggagtgcagtggtgcaatctcagctcactgcaacctccacctcccaggtcctggttcaagcaattctcctgccttagcctcccgagtagctgggattacaggcacactccaccatgtccagttaattttttgtatttttagtagagacagggtatcaccatgttggccatgctggtcttgaactcttaacctcatgatctgcccgcctcagcctcccaaagttctgggattacaggtgtgagccaacatacccagccattactgtctttatatcgtttttaaagaaacttacattgatttccaaagacactcagtctctacttctttttttgtttgtttttgtttttgctctgcctcatgtgatctgcaggaagggacactcagtctcatcaagtaaaggaaagctggcgcacacatcaccaacagaaaatgactttaaaattttccataggccgggcaccatggctcatgcctgtaatcccagaactttgggaggccaaggcgggcggactgcctgaggtcaggagttcgagaccagcctggctaatgtggtgaaaccctgtctctactaaaaaatacaaaaaataaccgggcatgctggcacgtgcctgtaatcccagctactcgggaggctgaggcatgagaatcgcttgaacccgggagacagaggtttcagtgagcagagattgcgccactgcactccagcccagcgacagagtgagactccatctaaaaagaaaaagaaagattttttttccataagagcaagacctcacgccgaagcccagctgatgtggggccctgcgtcggccatcgatttgggaacacgggagatgcgcaagtgtctggaagccgttagagcaagttaataccagctaaggctttgtctattttatttttttaaactaaacactatattaatgagaattttattttttctctcttagagacgaggacttgctatgttgcccaggctggacttgaactcctagactcaagcaattcatcctcctcagcctcccaaagtgctgggattacaggcgtgagccactttgtcccactaaactgagattttatcaaggcttagaaggaataagagtgggtcgggtgtgatggctcacgcctgtaatcccagcactgtgggaggctgaggtgggtggatcacctgaggtcgggagttcgagaccagcctgaccaacatggtgaaaccccgtctctactaaaaaaacaaaattagccgggcgtgatggcgcatgcctgtaatcccagctgcttgggaggctgaggcaggagaatcacttgaacccaggaggtggaggttgcggtgagctgagatcgggccattgcactccagcctgggcaacgagagagaaactccgtctcaaaaacaaaaaaacaaaagaagaagaagtaagagtggaggccggagggggtggcttatacctctaatcccagcactttgggaggccaaggagggcggatcacttgaggccaggagtttgagaccagcatggccaacatggtgaaaccccaaaatttttacaaattttgtagaaaaagatacaaaaattagccaggtgtggtggtacactcctgtaatcccagctactcaggaggctgaggcaggacaattgcttaacccaggagacggaggttgcagtgagctgtgattgcgccactgcactcctgcctaggagacagagtgagagtccatctcaaaaaaaagaaaaaggagtggaaaaggaaaaatcaactctcccgatgcatgaggtgggtgatttaatgctgagtcttgtcccagcacctcattaggtgcatctaaaattctagtgactcagctacttgggaggccgaggcaggaagatcacttgaggccaggagttcaaatccagcctgggcaacatagcaagacccctgtctctacaaaaaaataacaatttagctaggcatggtggagtgtacctgtaggctcaaccactggggaggctgaggcaggaagattgtttgagcccaggagttcgaggctgcagtgagctatgatcgtgccactgcactccagcctgggtgacagagcaagaccctgtctcgaaaaaaataatgattaaaaaaataaaattccagtgactctccccaagttgcccagttaacccagagcagacagccccagcccacttgcccccggcctctctcaggggaaggcgagtcaagggcagaagccagcaggccagaagcccttcctgcgaccgtgaggagagaagcaggcaaggtccaggcttaagtacacattgttttctcggcaggtggacgtcatttcggggtaaacaatgtcaagagcttccctggttctcagccgaggccctgacagtcctgggctgggagcccgggcctggccctgattctccactgtgtgaccccaggctgctcacttccctggggcctcagtttcctcctctgagaagtggggataataatagaacctccttccttgccatgagggctttcggccaagatggagagaggaaaattgtgtttgcttggagcggggaatctcctcctcacctttttgtttccctccctgtgggctgctcagggctgagaactttctcccagacagagccatctagagcaaaggggttgagagacagcttggcgagggagtgagctccctgttggagagggtatgcaagaaggaaaaaaaaaaaaaagaagaagaggtggaaatggagctggacatgatgcatcctggggagttggcggcaaagctttcggaaatctacttggccagaaatcccatattagccctctgaggctgcaacagacccagaatgacaatagctccgtggcaaaatggtcataggcacagtggttggggtcaaagggatctgacttaaagttctggtgccttcctgagcctcgggtcctaaactgcaaacagcaatgccaggccctgactcctccgtcagtggtgtagcaggaccccagagagagcacaggctattcttggggcggtggcctgagtcaccatccctgtgacgcacaggccaccctctgagaagtgactgactctgggaggaggcagggggcacaggcagcaagccatgacctgagcgtgtgccaggagcccttgctgcttcctacagaggcccctagtcccttgctccggtcatttttggatggcaccttgcaattagcaaagcatttccaggcccttgacttcagagactatcttttttttttttccaagacaggatctcactctgtctcccaggctggagtgcagggatgcgatcttggctctctgcagcctccacctcctggactcgggcgatcttcccacctcaggctcctgagtagctcggactacaggtgcgcaccaccacacctgggtaatttttgtattttttgtacagagggggttttgctatgttgcccagactggtcttgaactcctgggctcaagcaatcctctcacctcggcctcccaaagtgctgggattacaggtgtgagccacagtgcctagctgagactcttttttatttattatttttatttttattttttgttgcccaggctggagtgtagtggctcaatcttggctcactgcaacctccacctcccgggttcaagtgattctcctgcctcagcctccggagtagctgggattacaggtgcccaccaccacacccggctaatttttgtattttttttttttttttagtagagacagggtttcaccatgttggccaagctagttttgaactcctgagctcaagtgatccgcccgcttcagcctcccaaagtgctgggattacaggcgtgagccactgcaaccagcctctctttttttgagacagagtcttgctctgttcccaggctggagtgcaatggtgtcatctcggctcactgcaacctctgcctcccgggttcaagtgattctcctgcctcagtctcccaagcagctgggactacaggcgcataccaccacgcccagctactttttgtatttttagtagagatggggtttcaccatgttggccagatggtcttgatctcttgacctcatgatccgcccacctcggcctgggattacaggcgtaagccaccgtacccggcctctttttttttttttttttctgacacagtctcactctgtcgtccaggctggagtgcagtggcatgatctcggctcactgcaacctccgcctcccaggttcaagcaattctcctgcctcagcctcctgagtagctgggattccaagcatgagccactgtgcccagctgagactcattttctagaaagtaaaggtcaggattcattcctggatgccactcccccttctctccctctgctcattaccttccctcacccccgtccagcctccaggcctttggcctggctgttcctgctgcctagaacactgttccccctgctttccctgaggccagctcctcatgctccagctcttcctcaccaaggctctctcttgcctgtttggggtccgatggcctgggttcatgtcccagctctgctgtgctccctggggtacagggcatgccctctctgtgcctcactctcctcatctggaaagtgggtagaatagtggtttgccctactattattgttaagttgtgaagattacatgaattaatcttgcaaagtacttagaactgcgtggggctcccagtaggtgcctaataattgtaggctctttggtagtcccatcatgacactgtctaacccactactcagggagtttcatgaggacaggactgggtgtgtcttggatactgctgtgtccctcacgcccaaccatacatgacctagtatacagcaggtgctcaattaaggaagaagcaagtgtgagatcagcctccctccaccctcagtcctggtcctagctttgcccacagttctaagactgaacaactgcagtctgcccagtgccttacctggatggggctacagggatgcctgcagggggcctctgggactccaggatcttcctcttgaactcctccaggctagctgggtctgtggagggagagaggtgaggcttgacctacagcttcagttgcccctgcccctgggctagggatgggctggcagcccaggggagtgggaaagtggggctggggtggggttcgaggtggaaaggggcccctcccctacttggctctgtcttttgtcactcaccgatgggctgggggttggggacagggcccatgggccttgacactggcatcatcggctgcgactgtgaaagaaagatggagggaggttggtaggagccagggcttcccagacaggcttctgccttttcttttcttttctttttctttttttttttttttttgagacggagtttcgctcttgttgcccaggctggagtgcagtggtgtgatcttggctcattgcaaactctgcctcccaggttcaagcgattctcctgcctaagcctcctgggtagctgggactacagtcacacaccaccatgcctggctaattttttgtatttttaatagagctggggtttcactatgttggccaggctggtctcgaactcctgacctcaggtgatctgcctgcctcggcctcccaaagtgctgggattacaggcatgaaccactgcacccggccaggttctgtgctttcatgcccttcaagaccatcgtctctaaagtccttccagggcagggtaacagaccccatgtagaaagacatacatggtcatgaacatagaatcacctgcacgcaccacaagacttggggacaccacaagatggcttggggacttgtgggactgatcacctcggcagtcctgaggccccatgctgcagagctggcctacccctgtctccatcacagcctcagggtgaatccagttccaacccaagaccccatcggagtctactcacccaccacagcccccttcagactgaagccaacctaccgtgtagactaactggaccccgatcctaaatgccacccctggaatatccctgagccaatcccccaaaacctgaaatccaaagccaattctgaactcaatcacctaaaatctgatcccaacgtgaaaagtcaatctcccttagaatcaagcctcagcctaaacccagtcctaattataaactggatctgaccatatcttcagatctcactctgactccaaccattctcttgacccaacctctatgaaaatacccgtttcgggccaggcgtggtggctcacgcccgtaatcccaacactttgggaagccgaggtgggcagatcccctgaggtcaggagttcgagaccagcctggccaacatggtgaaaccccatctctactaaaaataaaaaaaaataaaaaaaaaaaaatcagccgggcctggtggcgggcacctgtagtcgcagctactcggggaagctgaggcaggagaattgcttgaacctgggaggcggaggtagcagtgagccaagattgtaccactgcactccagcctgggtgacagagcgaaactctgtctcaaaaagaaaaaagagaaaatatccatttccccagccccagccctgtgctccaacatgtcctcctacaaacacttgtgcaatgtcatgctcaacctcctcaaccccagaccccagcctctgcccagctcccatcctaaacccaccctcagttccaatcccaacccaaacttcactccaatcctaaggccctatggagcccctgatgttaacccgaaacagtcctaagctggtcagttaccccaaatccacctcaacccacttccaccccgagattggcatctaccccaaattttcctctcaacccagccctgatcgtcactcaaccccaatgtccccagccataacccagggtcacccaatccttcaactcaactccaagcccactcaaccttccaccagtcaccctaaaccaaccgaacctcaactcctaacccattgtcaataccaatccctatgtcaatgccagtgaaatccaaaattcacccttggctgcaacctctaagcatctctataccgaccagccacctccagctaccagagcctccaatccagcttcagtgcttcaactcagtcccgaagcaactgagatcctagatcattcttcacccaacctcaccccctacaagcatccctgactcaatttgcaagcttttctcaccatccaaattccaaattcaaccccagttctaaaatcagtgaaatcctaagtgaaatcctaaccttaactcaaatcagctccagatacagcagtgaccaaaaactcatctcagcccaacttaaacacgagttcaaccttcacatcaactcttcctctaggcatcctcaccccagtatcactcccaacactaaaccaactccccggttcctcaacacaactcaaatacaggattttaactccgaccctaaccccaatcctcatcccagccgtaaaagaacccaccagctccctacgctcaaactcagcctcgattctttcatttttcgtttttagaattgggagcagattttattttattttagattcagtggggatgtgtgccagtttgttacactgggtatattgcatgatgcagaggtttgggtttcttttttttgagacggagtcttgctgtgtcacccaggctagagttgcagtggtgcgatctgggctcgctgcaacctctgcctcctgggttccggcgattctcatgcctcagcctcccaagaagcagctgggataacaggtgtctgccaccaagcctggctaatttttgtattattagtagaaacagggtttcaccatgttggccaggctggtctcgaactcctgacctcaggtgatccgcccacattggcctcccaaagtgctgggattacaggtgtgggccaccgcgcctggtcgtagaggtctgggtttctaatggtcccattgcccaagcaatgaacacagtacccaaaatgtaggtttttaaccccttcccccctcccttccaccctttcccattttggaaccccagatgtctgttgctcccatccttggtctttcactcaagctggagtgcagtggtgcaatcccggctcactgcagcctcaacctcctgggctcaagcaatcctcccacttctcagcctcccaagtagctgggattacaggtgtgtgccaccacacccggctaatttttttttttttttttttgagagagaattttgctctgtcacccaggctggagtgcagtggtgtgatcttggttcactgcaagctctgcctcccgggttcacgccattctcccgcctcagcctgctgagtagctgggactacaggcgcccgccaccacacccggctaaatttttttttgtatttttagtagagacgggatttcaccatgttagccaggatggcctccatctcctgacctcatgatccacccacctcggccgcccaaagtgccgggattacaggcatgagtcaccgcgcccggcctaatttttgtattttttttgtagggatggggttttgtgttttgtttgtttgtttgtttgagatggagtctcgctctgtcacccaggctggagtgcaatggcatgatattgactcactgcaaactctgtctcctgggttcaagagattctcctgtctcagcctcccaagtagctgggattacagacgcacgccgccacgcccagctaattttttgtgttttagtagaggcgaggtttcaccgtgttgcccaggctgatctcaaactctgagctcaggcaatccacctgcctccgcctcccaaagtgctaggattacaggcgtgagccaccacacccagcctggggtggggtcttgctatgttgcccaggctggtctgaactcctgagtttaagctatccttccaccttggcctcccaaaatgctgggattacaagtgtgagccaccaagcccagccagcctcaattcttaatcctttctcaatgtcattcctaattccaaactctaccctaatcctaatgccaataaacttctccatccacattactacaatcctataaccatctgtagggcggacagccaccaacaggtcatcacagtatccatcctaaatccaccctccatgcctcaactcaacccaaacccaaaagcaacagaaattctagatccaacccttcacccaaccctagacccgatatccaccctacctctaattccagtcttttttttttttttttttttttttttgagatggagtcttgttttgtcacccaggctggagtgcaatggctcgatcttggctcactgcaacctccacctcccgggttcaagcgattctcctgcttcagcctcctgagtagctgggattacaggtgcccgccaccacgcccggctaatttttgtatttttagcaaagacggggttttgccatgttggccaggctggtttcgaactcctgacctcaggcgatccacccaccttggcctcccaaagtgttgggattattggcatgagccactgcgcacggcactctaattccattcttaaccctacactcttctcaatgccatccccattccaagctctatcctgatcctaatgcctgatcctagagagttgtaactcacccaacctagaccaggaagccatcctcaaagccaactccaagttcaaatcgccaccaccctcttggcatctggacctaactccactgcagcctccctctggggcctgcaagcccaccttggtcttgatgcaggtgtccagggctgagtttctgatggccagctccatcctgagctgctccgcctccctcttcttctcttccagctccttggccaggttgtctcgttccttccgcagcaccgccttctcctccagcgctagctgggtctgccgggagcattcagcttggagcttggcctcccgggcctgagcctccttctccaccttctgtttcgcctcctgactggcccgcaggccctgctgggcttccagcttctggcgttggaggtctgagttctcgcgggccacgcgttcgatatccgcccggaggctccgggccagctcctccaccttggagctcatgaggctgggcatgtggtcgcaggctctgcggatggaggccaattccgagcccaggggatggtagaggttgtaacccaggttgtccaggctgcgtgggataatggagtccctccacaggttacgaaggtccatctcaaacttgtccttgtccaggggcaggcagagggcttgcaccttttgcagttgctccttggccagctggcgctcttggtgctgcagctcccgggttttcacgcattcaaccagctgttcctccgccacgcgtttgttcagcagcacgctttccttatccttagtgcaaatggtcttctccttggctatctccacctccagcgtcttcaccttctgattcagcatgaagagcaaggctaaggaaaacaggaccaggagacccaggaagattgggggctgccgagagcactgggcagggagtccaccaccccggctccctgcagccttagcactcaccatcgcagctcttgttcatgtccttgaattgatctctgcattgcttctcactcaagatgatggcagccatgtacctctgattgttcgtgtagatgacctgcccggaagataggggaaggacgcaggacagagcttagtgtcttgcccccaggactgcctggacccagatcgagcaccctggtggccagagtgagctgagttcacaagggcatggtccctttatgagggaatgttagaagccaggtgtggcagctcacacctgtcatcccaattacttgggaggctgaggtgggaggatcactcgagcccaagagtttgagaccagcctgggcaacatagtgagactcccatctcaataaaacaaacaaacaaaaataaataaacaaaaatatagtggatgtttgtctgatcttcaaaagcttttacagttactactatccagaaataaaaagacacaaagtataaatacatgctacaacatggatgaactttaaaaatattacatccacatttatggtcaactgaatttcttttttttttttttgaaatggagtttcactcctattgctgttgcccaggctggagtgcagtggcgcaatcttggctcaccacaacctctgcctcccagattcaaacaattctcctgtctcagcctcccaagcagctgagattacaggtggctgccaccacgactggctaatttgtttttttgtttttggtagagacagggtttcaccatgttggccaggctggtcttgaactcctgatctcaggtgatctgcccgcctcggcttcccaaagtgctgagactacaggcttgagccactgtgcccggctcgaattttttttttttttttttttttagacagggtctcactttgtcacccaggctggagtgcagtggcctgatctcagctcactgcaaccttgacctcccaggctcaagcaatcctcttgcatcagtctcccgaggagctaggactacaggtatgcgccaccactcctggccaattttttgtattttccttagagatgggggttttaccatgctgccgaggctggtcttgaactcctgagctcaaagaatccaactgccagggcctcccagccctgaatttttttgttttttttaaagagatggggtctcactctgttgcccaggctagagtacagtggagtgatcatagctcactgcagactcgaactcctgggttccagtgattctcctgcctcagcctccccagtagctgggactacaggcctgtgccaccacgcctgactgatttttaaatttttttttttttcttgagacagagtttcgctcttgttgcccaggctgaagtgcaatggcgcgatctcggctcactgcaacctccgcctcccgagttcaagcgattctcctgcctcagcctcctgagtagctgggattacaggcatgcgccacaacacccggctaatctttgcatttttagtagagatggggtttctccatgttggtcaggctggtcttgaactcccaacctcaggtgatccgcctatctcggcctcccaaagtgctgggattacaggcgtgagccaccatgcccagccttaaatttgtttttgtagagatggggtttcactatgtttaccagggtggtgacgatctcccccatcagcctcccaaattgctgggattacaggtgtgcaccaccatgcctggctatggtcaactgatttggacaaggatgctgctatgagctcaactgtatccccagtacctgagaatgtgactgtatttagaagtagggtttttttgtttttgttttttgtttttttacacagagtctcgctctatcacccaggctggagtacaatggctcgatctcagctcactgcaacctctgcctcccgggttcaagtgattctcctgcctcagcctcccgagtagttgggattacaggggcccaccaccctgcccggctaattttttttttttttttttttttttgagacggagtttcgctctttttgcccaggctggagtgcaatggcatgatctcggctcactgcaacctccacctcccgagttcaagtgattctcctg
